(19) United States
(12) Patent Application Publication
(10) Pub. No.: US 2025/0170194 A1
(43) Pub. Date: May 29, 2025

(54) MICROBIAL COMPOSITIONS AND METHODS FOR PRODUCING UPGRADED PROBIOTIC ASSEMBLAGES

(71) Applicant: Solarea Bio, Inc., Cambridge, MA (US)

(72) Inventors: Gerardo V. Toledo, Hopkinton, MA (US); Eric Michael Schott, West Roxbury, MA (US); Maria Juliana Soto-Giron, Cambridge, MA (US); Alicia Eve Ballok, Natick, MA (US); Mark Charbonneau, Medford, MA (US)

(21) Appl. No.: 19/054,394

(22) Filed: Feb. 14, 2025

Related U.S. Application Data
(63) Continuation-in-part of application No. 17/555,261, filed on Dec. 17, 2021, now abandoned.
Application No. 17/555,261 is a continuation of application No. PCT/US2020/038830, filed on Jun. 19, 2020.
Application No. PCT/US2020/038830 is a continuation-in-part of application No. PCT/US2019/049823, filed on Sep. 5, 2019.
(60) Provisional application No. 62/863,722, filed on Jun. 19, 2019.
(60) Provisional application No. 62/863,762, filed on Jun. 19, 2019.

(51) Int. Cl. A61K 35/747; A23L 33/135; A23L 33/14; A61K 31/715; A61K 35/742; A61K 36/064; A61P 17/06; A61P 19/02; A61P 29/00

(52) U.S. Cl. CPC A61K 35/747; A23L 33/135; A23L 33/14; A61K 31/715; A61K 35/742; A61K 36/064; A61P 17/06; A61P 19/02; A61P 29/00

(57) ABSTRACT

The present disclosure relates to the identification of a group of microorganisms, which are relatively abundant in the microbial communities associated with fruits and vegetables typically consumed raw and therefore transient or permanent members of the human microbiota. These microbes are used to augment the effects of additional probiotic strains. The consumption of mixtures of these microbes at relevant doses will produce a beneficial effect in the host. Therapeutic methods of the disclosure involve the use of live microorganisms or metabolites derived from said microorganisms to establish a microbial composition in the mammalian host that will provide a health benefit to a mammal in need thereof.

### CROSS REFERENCE TO RELATED APPLICATIONS

[0001] This application is a continuation-in-part of U.S. patent application Ser. No. 17/555,261, filed Dec. 17, 2021, which is a continuation of international application PCT/US2020/038830, filed Jun. 19, 2020, which claims the benefit of, and priority to, U.S. Provisional Application Nos. 62/863,722, filed Jun. 19, 2019 and 62/863,762, filed Jun. 19, 2019; and international application PCT/US2019/049823, filed Sep. 5, 2019.

### SEQUENCE LISTING

[0002] The instant application contains a Sequence Listing which has been submitted electronically in XML format and is hereby incorporated herein by reference in its entirety. Said XML file, created on Feb. 14, 2025, is named SBI-008USCIP_SLx.xml and is 2,688,956 bytes in size.

### FIELD OF THE DISCLOSURE

[0003] The disclosure relates to methods and compositions useful for producing upgraded probiotic assemblages.

### BACKGROUND

[0004] Daily consumption of fresh fruits, vegetables, seeds and other plant-derived ingredients of salads and juices is recognized as part of a healthy diet and associated with weight loss, weight management and overall healthy lifestyles. The health benefits associated with fresh fruits and vegetables are thought to be derived in part from vitamins, fiber, antioxidants as well as microbial products from the fermentation of complex carbohydrates and other plant-based polymers. There has been no clear mechanistic association between microbes in whole food plant-based diets and the benefits conferred by such a diet. The role of plant-associated microbes as probiotics, capable of contributing to a subject's microbiota composition and modulating human physiology in response to a plant-based diet, has been underappreciated.

[0005] Current probiotic technology does not fully leverage the beneficial properties of these microbes. Historically, probiotic compositions have been heuristically developed according to what has previously been established, most prominently featuring strains of Lactobacilli and Bifidobacteria. As such, there is a substantial opportunity to enhance the efficacy of probiotics using rationally designed compositions that combine these probiotic strains with additional beneficial, plant-derived microbes as well as with plant-derived fibers. Several aspects of human physiology that are known in the art to benefit from microbial function are described below.

### Inflammation

[0006] Microbes play a crucial role in modulating inflammation through complex interactions with the human immune system that balance pro-inflammatory and anti-inflammatory responses. Dysbiosis, or a disruption in gut microbial community structure and function, has been linked to increased inflammation and is thought to contribute chronic inflammatory conditions such as inflammatory bowel disease (IBD), rheumatoid arthritis, as well as metabolic disorders like obesity and diabetes (Godoy-Vitorino 2024). A central feature of these conditions is increased intestinal permeability, or “leaky gut,” wherein the impaired gut barrier allows proinflammatory microbial products including lipopolysaccharides (LPS) to trigger systemic inflammation and exacerbate disease symptoms (DiVincenzo et al., 2023). These observations highlight an opportunity for novel probiotic interventions to improve gut barrier function and support the management of inflammatory diseases.

[0007] Microbial metabolites are central to the immunomodulatory effects of probiotics. For example, certain bacteria, including strains Lactobacillus and Bacillus, produce short-chain fatty acids (SCFAs) that regulate immune function by inhibiting pro-inflammatory cytokines and promoting the development of regulatory T cells (Tregs) to maintain immune balance (Mann et al., 2024). Many of these effects are mediated through free fatty acid receptor 2 (FFAR2[GPR43]). This receptor is highly expressed on immune cells, including neutrophils, macrophages, and certain T cell subsets, as well as intestinal epithelial cells (Kimura et al., 2020). FFAR2 also strengthens epithelial barrier integrity and stimulates the release of antimicrobial peptides, thereby protecting against pathogenic invasion (Liu et al., 2021). By linking microbial SCFAs to immune signaling, FFAR2 plays a pivotal role in maintaining gut immune balance and has emerged as a promising therapeutic target for inflammatory and metabolic disorders. The affinity of FFAR2 for acetate and propionate is relatively high (EC₅₀ 250-500 μM) meaning that even relatively low physiologic concentrations can activate this receptor to induce anti-inflammatory responses (Schlatter et al., 2021).

[0008] Additionally, many probiotic microorganisms produce indole derivatives, such as indole-3-acetic acid (IAA), indole-3-aldehyde (IAld), indole-3-propionic acid (IPA) and indole, that can activate the human aryl hydrocarbon receptor (AhR) with different affinities (EC₅₀ ranging from 1-100 μM) (Denison et al., 2002). This transcription factor acts within the gut, to regulate inflammation and immune tolerance (Chen et al., 2023). Microbially produced neurotransmitters GABA, L-DOPA, and serotonin all show potential anti-inflammatory effects by modulating immune cell activity and reducing pro-inflammatory cytokine levels, with GABA acting on immune receptors, L-DOPA reducing neuroinflammation through dopamine pathways, and serotonin influencing immune responses via its receptors (Strandwitz 2018).

[0009] Structurally complex exopolysaccharides (EPS) produced by these bacteria can also modulate immune responses by enhancing host expression of anti-inflammatory cytokines like IL-10 while suppressing pro-inflammatory mediators (TNF-α, IL-6) and supporting intestinal barrier integrity (Salimi & Farrokh 2023). In addition, probiotics can inhibit the growth of pathogenic bacteria that trigger barrier dysfunction and inflammation (Ghosh et al., 2020).

### Gut Barrier Function

[0010] The human gastrointestinal tract functions as a barrier that contains the abundant community of microorganisms within the gut lumen and prevents opportunistic pathogens from entering internal organs of the body (Ghosh et al., 2021). Structural components of intestinal epithelium that contribute to this barrier function include tight junction proteins, gap junctions, and adherens junction proteins. However, the function of the gut barrier is impaired in several disease states, leading to increased translocation of bacteria, endotoxins, and other inflammatory mediators into host tissues (Ghosh et al., 2021). This phenomenon is often referred to as leaky gut. Gut barrier dysfunction is associated with numerous diseases that include, but are not limited to, inflammatory bowel disease (IBD), irritable bowel syndrome (IBS), celiac disease, diabetes, obesity, atherosclerosis, food allergy, rheumatoid arthritis, environment enteric dysfunction, cancer, and multiple sclerosis (Ghosh et al., 2021; Fasano 2020).

[0011] Several classes of microbial metabolites have been shown to regulate gut barrier permeability, including short chain fatty acids (acetate, propionate, and butyrate), bacteriocins, autoinducers, vitamins (vitamin K2, menadione, vitamin B2, vitamin B6, and vitamin B9), microbial amino acids, conjugated fatty acids, indole derivatives (indole, indole-3-propionic acid, 5-hydroxyl indole, indoxyl sulfate, serotonin, N-acetyltryptophan, and melatonin), bile acid metabolites, choline metabolites, and polyamines (Ghosh et al., 2021). In addition, structural components of microbial cells can influence gut barrier function. For example, bacterial components including lipopolysaccharide can activate Toll-like receptors (TLR) and nucleotide-binding and oligomerization domain (NOD)-like receptor pathways, thereby regulating epithelial tight junction expression (Ghosh et al., 2021).

[0012] These observations indicate gut barrier dysfunction is a factor that promotes systemic inflammation and contributes to a variety of disease states, and suggest that novel compositions of microbes designed to express functions that regulate intestinal barrier function could aid in improving gut barrier integrity and managing these diseases associated with leaky gut.

### SUMMARY

[0013] The disclosure relates to probiotic compositions containing a plurality of viable bacteria and fungi isolated from fresh fruits, vegetables and fermented foods comprising at least one microbial entity classified as a bacterium or fungus. Accordingly, in one aspect, the disclosure provides a synthetic microbial consortium comprising (i) at least 1×10\hat{ }7 colony forming units of a first microbial entity comprising a probiotic microbial species, and (ii) at least 1×10\hat{ }7 colony forming units of a second microbial entity comprising a food-derived microbial isolate, wherein the synthetic microbial consortium produces a synergistic functional interaction when grown together relative to each distinct microbial entity grown in isolation under the same conditions. In certain embodiments, the first microbial entity is selected from the group consisting of: a Bacillus subtilis, a Lactiplantibacillus plantarum, a Lactobacillus acidophilus, a Lacticaseibacillus casei, a Lacticaseibacillus rhamnosus, a Lacticaseibacillus paracasei, a Lentilactobacillus buchneri, a Levilactobacillus brevis, a Bacillus licheniformis, a Weizmannia coagulans, a Saccharomyces cerevisiae, and a Saccharomyces boulardii. In certain embodiments, the second microbial entity is selected from the group consisting of: Bacillus subtilis, Lactiplantibacillus plantarum, Bacillus endophyticus, Bacillus amyloliquefaciens, Bacillus safensis, Bacillus pumilus, Bacillus paralicheniformis, Bacillus amyloliquefaciens, Bacillus axarquiensis, Bacillus megaterium, Bacillus aryabhattai, Pichia membranifaciens, Pichia kudriavzevii, Pichia terricola, Saccharomyces cerevisiae, Saccharomyces boulardii, Kluyveromyces marxianus, Talaromyces atroroseus, Debaryomyces hansenii, Candida akabanensis, Candida dosseyi, Meyerozyma guilliermondii, Lentilactobacillus buchneri, Lacticaseibacillus casei, Lactobacillus acidophilus, Leuconostoc mesenteroides, Leuconostoc pseudomesenteroides, Schleiferilactobacillus harbinensis, Pediococcus parvulus, Pediococcus ethanolidurans, Pediococcus pentosaceus, Pediococcus paracasei, Galactomyces geotrichum, Nakazawaea ishiwadae, Streptococcus thermophilus, Weisella cibaria, Kazachstania servazzii, Pichia fermentans, and Holermanniella takashimae.

[0014] In certain embodiments of the synthetic microbial consortium, the synergistic functional interaction results in a two-fold or greater increased number of colony forming units produced of the first microbial entity alone or of the first and second microbial entities combined when the microbial entities are grown together, relative to the summed amount of colony forming units produced by growing an equivalent amount of each distinct microbial entity in isolation under the same culture conditions, and wherein:
[0015] (a) the first microbial entity is Bacillus subtilis, and the second microbial entity is selected from the group consisting of: Lentilactobacillus buchneri, Pediococcus parvulus, Lacticaseibacillus casei, Pediococcus ethanolidurans, Leuconostoc mesenteroides, Lactiplantibacillus plantarum, Schleiferilactobacillus harbinensis, Pichia membranifaciens, Pichia kudriavzevii, Meyerozyma guilliermondii, Holermanniella takashimae, Lactobacillus acidophilus, Galactomyces geotrichum, Candida akabanensis, Nakazawaea ishiwadae, and Saccharomyces cerevisiae;
[0016] (b) the first microbial entity is Lacticaseibacillus casei, and the second microbial entity is selected from the group consisting of: Bacillus endophyticus, Bacillus amyloliquefaciens, Bacillus subtilis, Pichia membranifaciens, Pichia kudriavzevii, Pichia fermentans, Bacillus safensis, Bacillus pumilus, and Bacillus paralicheniformis;
[0017] (c) the first microbial entity is Lactiplantibacillus plantarum, and the second microbial entity is selected from the group consisting of: Bacillus safensis, Bacillus subtilis, Saccharomyces cerevisiae, Pichia kudriavzevii, Saccharomyces boulardii, and Kluyveromyces marxianus;
[0018] (d) the first microbial entity is Lacticaseibacillus paracasei, and the second microbial entity is selected from Kluyveromyces marxianus and Saccharomyces boulardii;
[0019] (e) the first microbial entity is Lacticaseibacillus rhamnosus, and the second microbial entity is Kluyveromyces marxianus;
[0020] (f) the first microbial entity is Lentilactobacillus buchneri, and the second microbial entity is selected from the group consisting of: Bacillus subtilis, Bacillus amyloliquefaciens, Bacillus amyloliquefaciens, Bacillus safensis, Bacillus axarquiensis, Talaromyces atroroseus, Kluyveromyces marxianus and Saccharomyces boulardii;
[0021] (g) the first microbial entity is Lentilactobacillus acidophilus, and the second microbial entity is selected from the group consisting of: Bacillus axarquiensis, Bacillus amyloliquefaciens, Bacillus subtilis, and Saccharomyces boulardii;
[0022] (h) the first microbial entity is Levilactobacillus brevis, and the second microbial entity is Holermanniella takashimae;
[0023] (i) the first microbial entity is Bacillus licheniformis, and the second microbial entity is Schleiferilactobacillus harbinensis or Pediococcus ethanolidurans;
[0024] (j) the first microbial entity is Saccharomyces cerevisiae, and the second microbial entity is selected from the group consisting of: Bacillus pumilus, Bacillus subtilis, Bacillus amyloliquefaciens Lactiplantibacillus plantarum, and Leuconostoc mesenteroides; or
[0025] (k) the first microbial entity is Saccharomyces boulardii, and the second microbial entity is selected from the group consisting of: Lentilactobacillus buchneri, Pediococcus ethanolidurans, Lactobacillus harbinensis, Lactiplantibacillus plantarum, Lactobacillus acidophilus, Exiguobacterium sp., Pediococcus paracasei, Pediococcus pentosaceus and Lacticaseibacillus paracasei.

[0026] In certain embodiments of the synthetic microbial consortium, the synergistic functional interaction is production of an increased amount of acetate when the microbial entities are grown together, relative to the summed amount of acetate produced by an equivalent amount of each microbial entity grown in isolation under the same conditions, and wherein:
[0027] (a) the first microbial entity is Bacillus subtilis, and the second microbial entity is selected from the group consisting of: Leuconostoc pseudomesenteroides, Saccharomyces boulardii, Pediococcus ethanolidurans, Pediococcus pentosaceus, Lactiplantibacillus plantarum, Pichia membranifaciens, Pichia fermentans, Talaromyces atroroseus, Debaryomyces hansenii, Candida dosseyi, Streptococcus thermophilus, and Weisella cibaria;
[0028] (b) the first microbial entity is Lacticaseibacillus casei, and the second microbial entity is selected from the group consisting of: Pichia membranifaciens, Pichia fermentans, Pichia kudriavzevii, Bacillus atrophaeus, and Bacillus licheniformis;
[0029] (c) the first microbial entity is Lacticaseibacillus paracasei, and the second microbial entity is selected from the group consisting of: Bacillus subtilis, Bacillus amyloliquefaciens, Kluyveromyces marxianus, Bacillus atrophaeus, and Saccharomyces boulardii;
[0030] (d) the first microbial entity is Lactiplantibacillus plantarum, and the second microbial entity is selected from the group consisting of: Saccharomyces bouldardii, Kluyveromyces marxianus, Bacillus subtilis, Holermanniella takashimae, Bacillus pumilus, Talaromyces atroroseus, and Pichia terricola;
[0031] (e) the first microbial entity is Lentilactobacillus buchneri, and the second microbial entity is Saccharomyces boulardii or Kluyveromyces marxianus;
[0032] (f) the first microbial entity is Lentilactobacillus acidophilus, and the second microbial entity is Talaramyces atroroseus or Bacillus amyloliquefaciens;
[0033] (g) the first microbial entity is Lacticaseibacillus rhamnosus, and the second microbial entity is Saccharomyces boulardii or Talaromyces atroroseus;
[0034] (h) the first microbial entity is Bacillus licheniformis, and the second microbial entity is Lacticaseibacillus casei;
[0035] (i) the first microbial entity is Weizmannia coagulans, and the second microbial entity is Pichia fermentans or Saccharomyces cerevisiae;
[0036] (j) the first microbial entity is Saccharomyces cerevisiae, and the second microbial entity is Lactococcus lactis or Bacillus amyloliquefaciens; or
[0037] (k) the first microbial entity is Saccharomyces boulardii, and the second microbial entity is selected from the group consisting of: Lentilactobacillus buchneri, Pediococcus ethanolidurans, Lacticaseibacillus rhamnosus, Pediococcus ethanolidurans, Lactiplantibacillus plantarum, Bacillus amyloliquefaciens, Bacillus subtilis, Bacillus amyloliquefaciens, and Bacillus aryabhattai.

[0038] In certain embodiments of the synthetic microbial consortium, the synergistic functional interaction is production of an increased amount of propionate when the microbial entities are grown together, relative to the summed amount of propionate produced by an equivalent amount of each microbial entity grown in isolation under the same conditions, and wherein:
[0039] (a) the first microbial entity is Bacillus subtilis, and the second microbial entity is selected from the group consisting of: Pediococcus pentosaceus, Pichia membranifaciens, Holermanniella takashimae, Lacticaseibacillus casei, Lentilactobacillus buchneri, Lacticaseibacillus casei, and Debaryomyces hansenii;
[0040] (b) the first microbial entity is Lacticaseibacillus casei, and the second microbial entity is Bacillus subtilis or Bacillus safensis;
[0041] (c) the first microbial entity is Lentilactobacillus buchneri, and the second microbial entity is Bacillus subtilis or Bacillus amyloliquefaciens; or
[0042] (d) the first microbial entity is Saccharomyces boulardii, and the second microbial entity is Bacillus amyloliquefaciens.

[0043] In certain embodiments of the synthetic microbial consortium, the synergistic functional interaction is production of an increased amount of indole derivatives when the microbial entities are grown together, relative to the summed amount of indole derivatives produced by an equivalent amount of each microbial entity grown in isolation under the same conditions, and wherein:
[0044] (a) the first microbial entity is Bacillus subtilis, and the second microbial entity is selected from the group consisting of: Kazachstania servazzii, Kluyveromyces marxianus, Leuconostoc mesenteroides, Pediococcus parvulus, Leuconostoc pseudomesenteroides, Lactiplantibacillus plantarum, Lactiplantibacillus casei, Lentilactobacillus buchneri, Pediococcus pentosaceus, Pichia fermentans, Pichia kudriavzevii, Galactomyces geotrichum, Clavispora sp., Holermanniella takashimae, Talaromyces atroroseus, Weisella cibaria, Debaryomyces hansenii, Candida dosseyi, Saccharomyces cerevisiae, Candida almanaticensis, and Nakazawaea ishiwadae;
[0045] (b) the first microbial entity is Lacticaseibacillus casei, and the second microbial entity is selected from the group consisting of: Bacillus licheniformis, Bacillus paralicheniformis, Bacillus endophyticus, and Bacillus subtilis;
[0046] (c) the first microbial entity is Lactiplantibacillus plantarum, and the second microbial entity is selected from the group consisting of: Bacillus licheniformis, Bacillus paralicheniformis, Bacillus mojavensis, and Bacillus subtilis;
[0047] (d) the first microbial entity is Lentilactobacillus buchneri, and the second microbial entity is Bacillus axarquiensis or Bacillus subtilis;
[0048] (e) the first microbial entity is Lentilactobacillus acidophilus, and the second microbial entity is selected from the group consisting of: Candida akabanensis, Pichia terricola, Debaryomyces hansenii, and Candida dosseyi;
[0049] (f) the first microbial entity is Levilactobacillus brevis, and the second microbial entity is Bacillus subtilis;
[0050] (g) the first microbial entity is Bacillus licheniformis, and the second microbial entity is Lacticaseibacillus casei or Lactiplantibacillus plantarum; or
[0051] (h) the first microbial entity is Saccharomyces cerevisiae, and the second microbial entity is selected from the group consisting of: Bacillus mojavensis, Bacillus subtilis, Bacillus amyloliquefaciens, and Bacillus megaterium.

[0052] In certain embodiments, the synthetic microbial consortium further comprises a prebiotic polysaccharide (e.g., oligofructose, fructooligosaccharide, or a plant extract).

[0053] In certain embodiments, the synthetic microbial consortium further comprises a cryoprotectant, wherein the cryoprotectant is present in an effective amount to extend survival of the microbial entities during storage at a cryogenic temperature.

[0054] In certain embodiments, the synthetic microbial consortium is formulated as a dietary supplement, as a solid foodstuff, as a medical food, or as a pharmaceutical composition.

[0055] In certain embodiments of the synthetic microbial consortium, the microbial entities are co-formulated in a unit dose formulated for oral administration. In certain embodiments, the unit dose comprises between 1×10⁷ and 1×10¹² cfu/dose of each of the first microbial entity and the second microbial entity.

[0056] In certain embodiments of the synthetic microbial consortium, the first microbial entity and the second microbial entity increase immune health or produce an anti-inflammatory effect in a mammalian host.

[0057] In another aspect, the disclosure provides a method for treating, preventing, reducing severity, or enabling dietary management of at least one symptom in a subject having an immune system disorder, wherein the method comprises administering an effective amount of a synthetic microbial consortium of the disclosure to the subject, thereby treating, preventing, reducing the severity, or enabling the dietary management of the at least one symptom in the subject. In certain embodiments, the immune system disorder is selected from allergic rhinitis, allergic conjunctivitis, allergic bronchial asthma, atopic eczema, anaphylaxis, insect sting, drug allergy, food allergy, asthma, eczema, ulcerative colitis, Crohn's disease, celiac disease, multiple sclerosis, psoriasis, psoriatic arthritis, and a disorder or condition associated with a pathological Th17 activity.

[0058] In another aspect, the disclosure provides a synthetic microbial consortium, comprising (i) a probiotic Bacillus subtilis, and (ii) a second microbial entity comprising a food-derived microbial isolate selected from a Saccharomyces cerevisiae, a Lacticaseibacillus casei, a Pediococcus ethanolidurans, a Pichia membranifaciens, and a Lactiplantibacillus plantarum, wherein the synthetic microbial consortium produces a synergistic functional interaction comprising production of an increased amount of acetate when the microbial entities are grown together, relative to the summed amount of acetate produced by an equivalent amount of each microbial entity grown in isolation under the same conditions, and wherein administering an effective dose of the synthetic microbial consortium to a mammalian subject produces an anti-inflammatory effect in a mammalian host.

### BRIEF DESCRIPTION OF THE DRAWINGS

[0059] These and other features, aspects, and advantages of the present disclosure will become better understood with regard to the following description, and accompanying drawings.

[0060] FIG. 1 is a schematic summarizing a human gut simulator experiment. The experiment comprises an in vitro system that represents various sections of the gastrointestinal tract. Isolates of interest are incubated in the presence of conditions that mimic particular stresses in the gastro-intestinal tract (such as low pH or bile salts), heat shock, or metformin. After incubation, surviving populations are recovered. Utilizing this system, the impact of various oral anti-diabetic therapies alone or in combination with probiotic cocktails of interest on the microbial ecosystem is tested.

[0061] FIGS. 2A-2C are bar graphs depicting synergistic interactions between Saccharomyces cerevisiae var. boulardii with other commercial or food-associated microbes. FIG. 2A depicts growth synergies where S. boulardii growth is enhanced (black bars), the added food-derived strain's growth is enhanced (white bars) or the DMA combination's growth is enhanced relative to the individual strain's combined expected growth (gray bars).

[0062] FIG. 2B depicts instances where total acetate production (gray bars) is enhanced relative to the probiotic strain (black bars) and food-derived strain (white bars) individual acetate production. FIG. 2C depicts instances where total propionate production (gray bars) is enhanced relative to the probiotic strain (black bars) and food-derived strain (white bars) individual acetate production.

[0063] FIGS. 3A-3D are bar graphs depicting synergistic interactions between Lactobacillus acidophilus La-14 with other commercial or food-associated microbes. FIG. 3A depicts growth synergies where L. acidophilus growth is enhanced (black bars), the added food-derived strain's growth is enhanced (white bars) or the DMA combination's growth is enhanced relative to the individual strain's combined expected growth (gray bars).

[0064] FIG. 3B depicts indole production synergies where total indole score (gray bars) is enhanced relative to the probiotic strain (black bars) and food-derived strain (white bars) individual indole scores. FIG. 3C depicts instances where total acetate production (gray bars) is enhanced relative to the probiotic strain (black bars) and food-derived strain (white bars) individual acetate production. FIG. 3D depicts instances where total propionate production (gray bars) is enhanced relative to the probiotic strain (black bars) and food-derived strain (white bars) individual acetate production.

[0065] FIGS. 4A-4D are bar graphs depicting synergistic interactions between Bacillus subtilis DE111 with other commercial or food-associated microbes. FIG. 4A depicts growth synergies where B. subtilis growth is enhanced (black bars), the added food-derived strain's growth is enhanced (white bars) or the DMA combination's growth is enhanced relative to the individual strain's combined expected growth (gray bars). FIG. 4B depicts indole production synergies where total indole score (gray bars) is enhanced relative to the probiotic strain (black bars) and food-derived strain (white bars) individual indole scores. FIG. 4C depicts instances where total acetate production (gray bars) is enhanced relative to the probiotic strain (black bars) and food-derived strain (white bars) individual acetate production. FIG. 4D depicts instances where total propionate production (gray bars) is enhanced relative to the probiotic strain (black bars) and food-derived strain (white bars) individual acetate production.

### DETAILED DESCRIPTION

### Definitions

[0066] Terms used in the claims and specification are defined as set forth below unless otherwise specified.

[0067] The term “ameliorating” refers to any therapeutically beneficial result in the treatment of a disease state, e.g., a metabolic disease state, including prophylaxis, lessening in the severity or progression, remission, or cure thereof.

[0068] The term “in situ” refers to processes that occur in a living cell growing separate from a living organism, e.g., growing in tissue culture.

[0069] The term “in vivo” refers to processes that occur in a living organism.

[0070] The term “mammal” as used herein includes both humans and non-humans and includes but is not limited to humans, non-human primates, canines, felines, murines, bovines, equines, and porcines.

[0071] As used herein, the term “derived from” includes microbes immediately taken from an environmental sample and also microbes isolated from an environmental source and subsequently grown in pure culture.

[0072] The term “percent identity,” in the context of two or more nucleic acid or polypeptide sequences, refers to two or more sequences or subsequences that have a specified percentage of nucleotides or amino acid residues that are the same, when compared and aligned for maximum correspondence, as measured using one of the sequence comparison algorithms described below (e.g., BLASTP and BLASTN or other algorithms available to persons of skill) or by visual inspection. Depending on the application, the percent “identity” can exist over a region of the sequence being compared, e.g., over a functional domain, or, alternatively, exist over the full length of the two sequences to be compared. In some aspects, percent identity is defined with respect to a region useful for characterizing phylogenetic similarity of two or more organisms, including two or more microorganisms. Percent identity, in these circumstances can be determined by identifying such sequences within the context of a larger sequence, that can include sequences introduced by cloning or sequencing manipulations such as, e.g., primers, adapters, etc., and analyzing the percent identity in the regions of interest, without including in those analyses introduced sequences that do not inform phylogenetic similarity.

[0073] For sequence comparison, typically one sequence acts as a reference sequence to which test sequences are compared. When using a sequence comparison algorithm, test and reference sequences are input into a computer, subsequence coordinates are designated, if necessary, and sequence algorithm program parameters are designated. The sequence comparison algorithm then calculates the percent sequence identity for the test sequence(s) relative to the reference sequence, based on the designated program parameters.

[0074] Optimal alignment of sequences for comparison can be conducted, e.g., by the local homology algorithm of Smith & Waterman, Adv. Appl. Math. 2:482 (1981), by the homology alignment algorithm of Needleman & Wunsch, J. Mol. Biol. 48:443 (1970), by the search for similarity method of Pearson & Lipman, Proc. Nat'l. Acad. Sci. USA 85:2444 (1988), by computerized implementations of these algorithms (GAP, BESTFIT, FASTA, and TFASTA in the Wisconsin Genetics Software Package, Genetics Computer Group, 575 Science Dr., Madison, Wis.), or by visual inspection (see generally Ausubel et al., infra).

[0075] One example of an algorithm that is suitable for determining percent sequence identity and sequence similarity is the BLAST algorithm, which is described in Altschul et al., J. Mol. Biol. 215:403-410 (1990). Software for performing BLAST analyses is publicly available through the National Center for Biotechnology Information.

[0076] The term “sufficient amount” means an amount sufficient to produce a desired effect, e.g., an amount sufficient to alter the microbial content of a subject's microbiota.

[0077] The term “therapeutically effective amount” is an amount that is effective to ameliorate a symptom of a disease. A therapeutically effective amount can be a “prophylactically effective amount” as prophylaxis can be considered therapy.

[0078] As used herein the term “method” refers to manners, means, techniques and procedures for accomplishing a given task including, but not limited to, those manners, means, techniques and procedures either additional to, or readily developed from additional manners, means, techniques and procedures by practitioners of the chemical, pharmacological, biological, biochemical and medical arts.

[0079] As used herein, the terms “administer”, “administering”, or “administration” refer to the placement or delivery of a composition or substance (e.g., a DMA or microbial composition described herein) onto or into a subject, e.g. orally, rectally, parenterally, or intranasally. In some embodiments, one or more persons who are not the subject (e.g., an investigator or medical worker) may administer a composition or substance to the subject. In some embodiments, the subject may administer a composition or substance to themself.

[0080] As used herein, the term “treating” includes abrogating, inhibiting substantially, slowing, or reversing the progression of a condition, substantially ameliorating clinical or aesthetical symptoms of a condition.

[0081] As used herein, the term “preventing” includes completely or substantially reducing the likelihood or occurrence or the severity of initial clinical or aesthetical symptoms of a condition.

[0082] As used herein, the term “about” includes variation of up to approximately +/−10% and that allows for functional equivalence in the product.

[0083] As used herein, the term “colony-forming unit” or “cfu” is an individual cell that is able to clone itself into an entire colony of identical cells.

[0084] As used herein all percentages are weight percent unless otherwise indicated.

[0085] As used herein, “viable organisms” are organisms that are capable of growth and multiplication. In some embodiments, viability can be assessed by numbers of colony-forming units that can be cultured. In some embodiments, viability can be assessed by other means, such as quantitative polymerase chain reaction.

[0086] The term “derived from” includes material isolated from the recited source, and materials obtained using the isolated materials (e.g., cultures of microorganisms made from microorganisms isolated from the recited source).

[0087] “Microbiota” refers to the community of microorganisms that occur (sustainably or transiently) in and on an animal or plant subject, typically a mammal such as a human, including eukaryotes, archaea, bacteria, and viruses (including bacterial viruses, i.e., phage).

[0088] “Microbiome” refers to the genetic content of the communities of microbes that live in and on the human body, both sustainably and transiently, including eukaryotes, archaea, bacteria, and viruses (including bacterial viruses (i.e., phage)), wherein “genetic content” includes genomic DNA, RNA such as ribosomal RNA, the epigenome, plasmids, and all other types of genetic information.

[0089] The term “subject” refers to any animal subject including humans, laboratory animals (e.g., primates, rats, mice), livestock (e.g., cows, sheep, goats, pigs, turkeys, and chickens), and household pets (e.g., dogs, cats, and rodents). In certain embodiments, the subject may be suffering from a dysbiosis, including, but not limited to, an infection due to a gastrointestinal pathogen or may be at risk of developing or transmitting to others an infection due to a gastrointestinal pathogen. In certain embodiments, the subject may have, or be at risk of developing, an immune system disorder.

[0090] The “colonization” of a host organism includes the non-transitory residence of a bacterium or other microscopic organism. As used herein, “reducing colonization” of a host subject's gastrointestinal tract (or any other microbial niche) by a pathogenic bacterium includes a reduction in the residence time of the pathogen in the gastrointestinal tract as well as a reduction in the number (or concentration) of the pathogen in the gastrointestinal tract or adhered to the luminal surface of the gastrointestinal tract. Measuring reductions of adherent pathogens may be demonstrated, e.g., by a biopsy sample, or reductions may be measured indirectly, e.g., by measuring the pathogenic burden in the stool of a mammalian host.

[0091] A “combination” of two or more bacteria includes the physical co-existence of the two bacteria, either in the same material or product or in physically connected products, as well as the temporal co-administration or co-localization of the two bacteria.

[0092] As used herein, “heterologous” designates organisms to be administered that are not naturally present in the same proportions as in the therapeutic composition as in subjects to be treated with the therapeutic composition. These can be organisms that are not normally present in individuals in need of the composition described herein, or organisms that are not present in sufficient proportion in said individuals. These organisms can comprise a synthetic composition of organisms derived from separate plant sources or can comprise a composition of organisms derived from the same plant source, or a combination thereof.

[0093] “Controlled-release” refers to delayed release of an agent, from a composition or dosage form in which the agent is released according to a desired profile in which the release occurs after a period of time.

[0094] The term “agriculturally-derived” means a microorganism isolated from an edible crop, a fermented food from such edible crop or products from animal origin in a farm setting such as dairy.

[0095] The term “organic farming” refers to an alternative agricultural system avoiding the use of agrochemicals including fertilizers and pesticides and substitutes these with compost and other natural practices. In a non-limiting illustrative example, USDA standards for organic practices require:
[0096] Land must have had no prohibited substances applied to it for at least 3 years before the harvest of an organic crop
[0097] Soil fertility and crop nutrients will be managed through tillage and cultivation practices, crop rotations, and cover crops, supplemented with animal and crop waste materials and allowed synthetic materials
[0098] Crop pests, weeds, and diseases will be controlled primarily through management practices including physical, mechanical, and biological controls. When these practices are not sufficient, a biological, botanical, or synthetic substance approved for use on the National List may be used
[0099] Operations must use organic seeds and other planting stock when available
[0100] The use of genetic engineering, ionizing radiation and sewage sludge is prohibited

[0101] The term “extract, fraction, tissue or portion of a plant” refers to the edible and non-edible components of a fresh fruit, vegetable or fermented food from which a subsample is collected for the isolation of bacteria and fungi.

[0102] The term “food” refers to edible nutritious substance that people or animals eat or drink in order to maintain life and growth.

[0103] The term “functional foods” refer to a food that has been enriched or fortified by the addition of other nutritional ingredients not found in the unenriched food item. The fortification can be done by the addition of vitamins, minerals and microorganisms (e.g., a probiotic microorganism and/or any of the microorganism described herein).

[0104] The term “medical foods” are foods that are specially formulated and intended for the dietary management of a disease that has distinctive nutritional needs that cannot be met by normal diet alone.

[0105] The term “foodstuff” as used herein, refers to a nutritional composition for oral administration that is in solid, liquid or gel form. A medical food can also be a foodstuff.

[0106] The term “probiotic microorganism” refers to a bacterium or fungus that, when consumed live, provides a health benefit to the consumer generally by improving or restoring the gut flora. Preferred probiotic microorganisms include microorganisms that are generally regarded as safe (“GRAS”), included certified GRAS microorganisms.

[0107] The term “probiotic composition” refers to compositions that include one or more probiotic microorganisms.

[0108] The term “prebiotic compounds” refer to a variety of compounds such as plant polymers, plant fibers, vitamins carbohydrate polymers found in dairy and other molecules that can act as substrates for microbial degradation and production of short chain fatty acids and other fermentable substrates.

[0109] The term “synbiotic” refers to a combination of probiotic microorganisms and prebiotic compounds in the same preparation and delivered together so the prebiotic compounds are utilized by the probiotic microorganisms.

[0110] The term “postbiotic” refers to probiotic cells that have been killed by heat or other means and are delivered to the consumer as dead cells.

[0111] “Beneficial microbially-produced compound” is any microbially-produced molecule that has a positive effect on human health and can be recognized as part of the use of “upgraded probiotic assemblages.”

[0112] The term “upgraded probiotic assemblages” refers to a combination of one or more microorganisms reported here in Table 4 and prebiotic compounds that when combined with a probiotic composition show a clear health beneficial effect.

[0113] The term “functional interaction” means the resulting effect when two or more bacteria and/or fungi growing in a culture vessel exchange substrates and products of metabolism with a resulting improved synergistic growth or production of a compound relative to the capacity of each of the bacteria and/or fungi grown alone; for example increased short chain fatty acid production measured by gas chromatography and the amount of short chain fatty acid by the co-cultured bacteria and/or fungi is greater than the sum of the short chain fatty acid production by the individual bacteria and/or fungi.

[0114] The term “artificially associated” means the use of rational approaches to combine microorganisms that do not naturally co-exists in the same sample, or where no demonstrations of spontaneous chance encounters, assemblies as consortium, and/or synergistic interactions are known or previously described.

[0115] The term “fermented probiotic composition” refers to an agricultural product that is subject to a natural process of microbial transformation to produce short chain fatty acids as part of preservation or flavor and that can be enriched with other microorganisms to enhance one of its properties.

[0116] The term “anti-inflammatory product” as used herein, refers to any substance that has an effect (either direct or indirect) on a subject in contact with the product that results in reduction of inflammation, or any detectable markers of inflammation known in the art.

[0117] The term “pro-inflammatory cytokines” as used herein, refers to small proteins that regulate the activity of blood cells such as immune system cells and are involved in the up-regulation of inflammatory reactions. Pro-inflammatory cytokines can be produced by activated macrophages or other immune cells, endothelial cells and epithelial cells.

[0118] The term “immune health” as used herein, refers to the functions and activity of the immune system and cells associated with the immune system of a healthy subject. As used herein, the term “improving immune health” refers to modulating the activity and/or function of the immune system so as to increase the immune system's ability to detect foreign antigens, pathogens, and/or abnormal cells (such as but not limited to cancer cells and infected cells), and/or refers to modulating the immune system's activity and/or function in a subject exhibiting abnormally increased immune system activity/immune response relative to healthy subjects, such as conditions or diseases related to increased inflammation (such as, but not limited to, Alzheimer's disease, cancer, asthma, heart disease, type II diabetes, rheumatoid arthritis) and/or conditions or diseases related to increased immune response (e.g., autoimmune disease).

[0119] The term “mammal” as used herein includes both humans and non-humans and include but is not limited to humans, non-human primates, canines, felines, murines, bovines, equines, and porcines.

[0120] The term “therapeutically effective amount” is an amount that is effective to ameliorate a symptom of a disease.

[0121] It must be noted that, as used in the specification and the appended claims, the singular forms “a,” “an” and “the” include plural referents unless the context clearly dictates otherwise.

[0122] As used herein “GOS” indicates one or more galacto-oligosaccharides and “FOS” indicates one or more fructo-oligosaccharide.

[0123] Throughout this application, various embodiments of this disclosure can be presented in a range format. It should be understood that the description in range format is merely for convenience and brevity and should not be construed as an inflexible limitation on the scope of the disclosure. Accordingly, the description of a range should be considered to have specifically disclosed all the possible subranges as well as individual numerical values within that range.

[0124] It is appreciated that certain features of the disclosure, which are, for clarity, described in the context of separate embodiments, can also be provided in combination in a single embodiment. Conversely, various features of the disclosure, which are, for brevity, described in the context of a single embodiment, can also be provided separately or in any suitable sub-combination or as suitable in any other described embodiment of the disclosure. Certain features described in the context of various embodiments are not to be considered essential features of those embodiments, unless the embodiment is inoperative without those elements.

[0125] The following abbreviations are used in this specification and/or Figures: ac refers to acetic acid; but refers to butyric acid; ppa refers to propionic acid. SBI refers to Solarea Bio isolate, DMA refers to defined microbial assemblage, rDNA refers to ribosomal DNA, cDNA refers to complementary DNA (i.e., a DNA product produced from RNA transcripts), ITS refers to internal transcribed spacer region of rDNA, HDAC refers to histone deacetylase, SCFA refers to short chain fatty acids, IAA refers to indole acetic acid, IPA refers to indole propionic acid, GABA refers to gamma aminobutyric acid, EPS refers to extracellular polymeric substances, LPS refers to lipopolysaccharide, IL-10 refers to Interleukin 10, IL-1β refers to Interleukin 1 Beta, IL-6 refers to Interleukin 6, IL-12 refers to Interleukin 12, IL-17 refers to Interleukin 17, IL-23 refers to Interleukin 23, TNFα refers to Tumor Necrosis Factor Alpha, IFN-γ refers to Interferon Gamma, Th17 refers to T helper 17 cells, CRP refers to C reactive protein, DMARD refers to disease modifying anti-rheumatic drug, PASI refers to psoriasis area severity index, TLR refers to Toll Like Receptor, CIA refers to collagen induced arthritis, DTH refers to delayed type hypersensitivity, IBD refers to inflammatory bowel disease, UC refers to ulcerative colitis, MS refers to multiple sclerosis, and PD refers to Parkinson's disease.

### Methods of the Disclosure

[0126] The compositions and methods disclosed herein can be used to treat various diseases and disorders in a subject. For example, the compositions disclosed herein can be used in a method of improving immune health and/or in treating or managing an immune symptom disorder or a symptom thereof, the method comprising administering the compositions a subject in need thereof. The immune system disorder can selected from, e.g., allergic rhinitis, allergic conjunctivitis, allergic bronchial asthma, atopic eczema, anaphylaxis, insect sting, drug allergy, food allergy, asthma, eczema, ulcerative colitis, Crohn's disease, celiac disease, multiple sclerosis, psoriasis, psoriatic arthritis, and a disorder or condition associated with a pathological Th17 activity.

[0127] The compositions described herein can be used in methods of improving immune health in a subject in need thereof, the method comprising administering to the subject an effective amount of the composition. In certain embodiments, the method modulates the level and/or activity of an inflammatory cytokine in a subject. In certain embodiments, the modulating the level and or activity of an inflammatory cytokine, comprises reducing the level and/or activity of at least one inflammatory cytokine selected from the group consisting of IFNγ, IL-12, TNF-α, IL-17, IL-6, IL-1β, IL-10, and combinations thereof. In certain embodiments, the level and/or activity of the at least one inflammatory cytokine is reduced in the serum or select tissue of subject after administration of the composition, medical food, dietary supplement or solid food stuff compared to a level and/or activity of the at least one inflammatory cytokine prior to administration of the composition, medical food, dietary supplement or solid food stuff. In certain embodiments, the level and/or activity of the at least one inflammatory cytokine in the serum or select tissue of a human subject after the administration of the effective amount of the composition, medical food, dietary supplement or solid food stuff. In certain embodiments, the method causes an anti-inflammatory effect in the subject. In certain embodiments, the anti-inflammatory effect is caused by the production of at least one anti-inflammatory metabolite by either the first microbial entity, the second microbial entity or both the first and the second microbial entities. In certain embodiments, the method prevents, reduces the severity of, and/or enables the dietary management of an immune system disorder, e.g., an immune system disorder selected from allergic rhinitis, allergic conjunctivitis, allergic bronchial asthma, atopic eczema, anaphylaxis, insect sting, drug allergy, food allergy, asthma, eczema, ulcerative colitis, Crohn's disease, celiac disease, multiple sclerosis, psoriasis, psoriatic arthritis, a disorder or condition associated with a pathological Th17 activity, and combinations thereof. In certain embodiments, improving immune health comprises reducing inflammation in the human subject.

[0128] The compositions disclosed herein can be used in a method for improving the efficacy of a probiotic microorganism in improving or maintaining health in a subject in need thereof (e.g., a human subject), the method comprising administering the composition to the subject.

[0129] The compositions disclosed herein can also be used in (i) a method for treating or managing Type 2 diabetes in a subject in need thereof, (ii) a method for treating or managing osteoporosis in a subject in need thereof, and (iii) is a method for improving the efficacy of a probiotic microorganism in improving or maintaining health in a subject in need thereof, the method comprising administering the composition to the subject.

[0130] Administration of the microbial composition can be accomplished orally or rectally, although administration is not limited to these methods. In some embodiments, the microbial composition is administered orally. In some embodiments, the microbial composition is delivered rectally. In some embodiments, the administration of the microbial composition occurs at regular intervals. In some embodiments, the administration occurs daily. In some embodiments, the administration occurs twice daily.

[0131] The microbial composition can be administered via typical pharmacological means, such as slurries, capsules, microcapsules, or solutions, although means of administration are not limited to these methods. In some embodiments, an enteric capsule or enteric microcapsule is used. In some embodiments the microbial composition involving the microbial composition described herein will be fresh or frozen prior to/upon application. In some embodiments, said microbial composition will be lyophilized or otherwise treated to increase stability or otherwise obtain a benefit from said treatment.

[0132] In some embodiments, the microbial composition is administered with an effective amount of an additional therapeutic agent or along with an effective drug regimen. These include, but are not limited to, metformin, methotrexate, Acarbose, Miglitol, Voglibose, Sitagliptin, Saxagliptin, Liraglutide, Semaglutide, Tirzepatide, Pioglitazone, dipeptidyl peptidase-4 (DPP4)-inhibitors, glucagon-like peptide-1 (GLP-1) receptor analogs, alpha glucosidase inhibitors, thiazolidinedione, and sodium/glucose cotransporter 2 (SGLT2) inhibitors. In another example, the microbial composition is administered along with anti-osteoporosis medications including but not limited to, bisphosphonates (e.g., alendronate, risedronate, ibandronate, zolendronate), biologics (e.g., denosumab, romosozumab), selective estrogen receptor mediators (e.g., Raloxifene), or anabolic agents (e.g., teriparatide, abaloparatide).

[0133] In some embodiments, the probiotic composition is co-administered with an effective amount of an additional therapeutic agent or along with an effective drug regimen to improve the efficacy of said therapeutic agent or drug regimen.

[0134] In some embodiments, the probiotic composition is co-administered with an effective amount of an additional therapeutic agent or along with an effective drug regimen to reduce the side effects of said therapeutic agent or drug regimen.

### Compositions of the Disclosure

[0135] In certain embodiments, compositions of the disclosure comprise probiotic compositions formulated for administration and/or consumption, with a prebiotic and any necessary or useful excipient. In other embodiments, compositions of the disclosure comprise probiotic compositions formulated for consumption without a prebiotic. Probiotic compositions of the disclosure are preferably isolated from foods normally consumed raw and isolated for cultivation. Preferably, microbes are isolated from different foods normally consumed raw, but multiple microbes from the same food source may be used.

[0136] It is additional to those of skill in the art how to identify microbial strains. Bacterial strains are commonly identified by 16S rRNA gene sequence. Fungal species can be identified by sequence of the internal transcribed space (ITS) regions of rDNA.

[0137] One of skill in the art will recognize that the 16S rRNA gene and the ITS region comprise a small portion of the overall genome, and so the sequence of the entire genome (whole genome sequence) may also be obtained and compared to additional species and/or strains.

[0138] Additionally, it is known to those skilled in the art that housekeeping conserved genes serve as reliable markers for bacterial and fungal identification by analyzing sequence homology due to their evolutionary conservation. Housekeeping genes are involved in essential and stable functions across different species. Seven example bacterial conserved genes include Protein GrpE, Ribosomal RNA small subunit methyltransferase H, Phosphoglycerate kinase, Transcription termination/antitermination protein NusA, 50S ribosomal protein L10, 50S ribosomal protein L23, and 30S ribosomal protein S8. Ten example fungal conserved genes include PAN2-PAN3 deadenylation complex subunit PAN3, p-loop containing nucleoside triphosphate hydrolase protein, NADPH-sulfite reductase, Zinc finger, RING/FYVE/PHD-type Zinc finger C2H2-type, Ribosome assembly factor mrt4, Exoribonuclease phosphorolytic domain 1, WD40-repeat-containing domain, Ribosomal protein S5 domain 2-type fold, and Heat shock protein 70 family. Exemplary reference sequences for these conserved genes are provided in SEQ ID NO: 179-768.

[0139] In certain embodiments, bacterial entities of the disclosure are identified by comparison of the 16S rRNA sequence to those of additional bacterial species, as is well understood by those of skill in the art. In certain embodiments, fungal species of the disclosure are identified based upon comparison of the ITS sequence to those of additional species (Schoch et al. PNAS 2012). In certain embodiments, microbial strains of the disclosure are identified by whole genome sequencing and subsequent comparison of the whole genome sequence to a database of additional microbial genome sequences. While microbes identified by whole genome sequence comparison, in some embodiments, are described and discussed in terms of their closest defined genetic match, as indicated by 16S rRNA sequence, it should be understood that these microbes are not identical to their closest genetic match and are novel microbial entities. This can be shown by examining the Average Nucleotide Identity (ANI) of microbial entities of interest as compared to the reference strain that most closely matches the genome of the microbial entity of interest. ANI is further discussed in Example 6.

[0140] In other embodiments, microbial entities described herein are functionally equivalent to previously described strains with homology at the 16S rRNA or ITS region. In certain embodiments, functionally equivalent bacterial strains have 95% identity at the 16S rRNA region and functionally equivalent fungal strains have 95% identity at the ITS region. In certain embodiments, functionally equivalent bacterial strains have 96% identity at the 16S rRNA region and functionally equivalent fungal strains have 96% identity at the ITS region. In certain embodiments, functionally equivalent bacterial strains have 97% identity at the 16S rRNA region and functionally equivalent fungal strains have 97% identity at the ITS region. In certain embodiments, functionally equivalent bacterial strains have 98% identity at the 16S rRNA region and functionally equivalent fungal strains have 98% identity at the ITS region. In certain embodiments, functionally equivalent bacterial strains have 99% identity at the 16S rRNA region and functionally equivalent fungal strains have 99% identity at the ITS region. In certain embodiments, functionally equivalent bacterial strains have 99.5% identity at the 16S rRNA region and functionally equivalent fungal strains have 99.5% identity at the ITS region. In certain embodiments, functionally equivalent bacterial strains have 100% identity at the 16S rRNA region and functionally equivalent fungal strains have 100% identity at the ITS region.

[0141] In certain embodiments, compositions disclosed herein comprise components derived from edible plants and can comprise a mixture of microorganisms, comprising bacteria, fungi, archaea, and/or other indigenous or exogenous microorganisms, all of which work together to form a microbial ecosystem with a role for each of its members.

[0142] In certain embodiments, the probiotic composition may include selected microorganisms and other ingredients that have been approved by the United States Food and Drug Administration (“US FDA” or “FDA”) and are Generally Recognized as Safe (“GRAS”). Accordingly, in embodiments where the probiotic composition is formulated to only include GRAS ingredients, the probiotic composition is suited for food products, food product contacting materials, and other compositions in which the probiotic composition will not contaminate a food or food product being produced. In certain embodiments, the probiotic composition may include selected microorganisms and other ingredients that have been approved by additional regulatory agencies and can also be considered to be Generally Recognized as Safe (“GRAS”).

[0143] In some embodiments, species of interest are isolated from plant-based food sources normally consumed raw. These isolated compositions of microorganisms from individual plant sources can be combined to create a new mixture of organisms. Particular species from individual plant sources can be selected and mixed with other species cultured from other plant sources, which have been similarly isolated and grown. In some embodiments, species of interest are grown in pure cultures before being prepared for consumption or administration. In some embodiments, the organisms grown in pure culture are combined to form a synthetic combination of organisms.

[0144] In certain embodiments, the bacteria are selected based upon their ability to modulate production of one or more branch chain fatty acids, short chain fatty acids, indole derivatives, neurotransmitters, and/or flavones in a mammalian gut.

[0145] In certain embodiments, microbial compositions comprise isolates that are capable of modulating production or activity of the enzymes involved in fatty acid metabolism, such as acetolactate synthase I, N-acetylglutamate synthase, acetate kinase, Acetyl-CoA synthetase, acetyl-CoA hydrolase, Glucan 1,4-alpha-glucosidase, or Bile acid symporter Acr3.

[0146] In certain embodiments, the administered microbial compositions colonize the treated mammal's digestive tract. In some embodiments, these colonizing microbes comprise bacterial assemblages present in whole food plant-based diets. In some embodiments, these colonizing microbes reduce free fatty acids absorbed into the body of a host by absorbing the free fatty acids in the gastrointestinal tract of mammals. In some embodiments, these colonizing microbes comprise genes encoding metabolic functions related to desirable health outcomes such as increased efficacy of anti-diabetic treatments, lowered BMI, lowered inflammatory metabolic indicators, etc.

[0147] Some embodiments comprise bacteria that are not completely viable but act by releasing metabolites that act in the gastro-intestinal tract of a patient promoting weight loss, increased efficacy of diabetic regimens, bone health or other desirable outcome. Some embodiments comprise a prebiotic composition derived from metabolites present in whole food plant-based materials, identified and enriched as part of the formula for oral delivery.

[0148] In certain embodiments, a composition of the disclosure comprises a bacterium and/or a yeast, e.g., a bacterium or yeast selected from Table 3 or Table 4. In certain embodiments, a composition of the disclosure comprises a microbe selected from Lactobacillus, a Bifidobacterium, and/or a Saccharomyces species. In certain embodiments, the composition comprises Lactobacillus reuteri, Lactobacillus paracasei, Lactobacillus salivarius Lactobacillus plantarum, Lactobacillus acidophilus, Lactobacillus reuteri protectis, Lactobacillus bulgaricus, Lactobacillus rhamnosus, Lactobacillus casei, Lactobacillus delbreukeii, Bifidobacterium infantis, Bifidobacterium longum, Bifidobacterium breve, Bifidobacterium bifidum, Bacillus cereus, Bacillus subtilis, Bacillus clausii, Bacillus coagulans, Clostridium butyricum, Akkermansia muciniphila, Hafnia alvei, and/or Saccharomyces boulardii.

[0149] In certain embodiments, the compositions described herein comprise a first and second microbial entity. In certain embodiments, a microbial entity of the composition (e.g., the second microbial entity) is selected from the group consisting of: a Lactobacillus sp., a Bifidobacterium sp., a Bacillus sp., and a Clostridium sp. In certain embodiments, the microbial entity (e.g., the second microbial entity) is selected from the group consisting of: Lactobacillus reuteri, Lactobacillus paracasei, Lactobacillus salivarius, Lactobacillus plantarum, Lactobacillus acidophilus, Lactobacillus reuteri protectis, Lactobacillus bulgaricus, Lactobacillus rhamnosus, Lactobacillus casei, Lactobacillus delbreukeii, Bifidobacterium infantis, Bifidobacterium longum, Bifidobacterium bifidum, Bifidobacterium breve, Streptococcus thermophilus, Escherichia coli Nissle 1917, Lactococcus lactis, Bacillus subtilis, Bacillus clausii, Bacillus coagulans, Clostridium butyricum, Akkermansia muciniphila, Hafnia alvei, and Saccharomyces boulardii.

[0150] In certain embodiments, a composition comprises a first and second microbial entity as set forth in the exemplary DMAs in Table 4.

[0151] In certain embodiments, at least one of the microbial entities in the composition (e.g., the first and/or second microbial entity) comprises a nucleic acid sequence having at least about 97% identity at the 16S or ITS locus with a sequence shown in SEQ ID NO: 1-178. In certain embodiments, at least one of the microbial entities (e.g., the first and/or second microbial entity) is selected from the species set forth in Table 3 or Table 4. In certain embodiments, the microbial entity selected from Table 3 or Table 4 comprises a nucleic acid sequence having at least 97% identity (e.g., at least 98% identity, at least 99% identity, or 100% identity) at the 16S or ITS locus with a sequence shown in SEQ ID NO: 1-178. In certain embodiments, each of the microbial entities in the composition is selected from the microbes disclosed in Table 3 or Table 4, optionally wherein each of the microbial entities comprises a nucleic acid sequence having at least 97% identity (e.g., at least 98% identity, at least 99% identity, or 100% identity) at the 16S or ITS locus with a sequence shown in SEQ ID NO: 1-178.

[0152] In certain embodiments, the first microbial entity is isolated from a food or food product. For example, the first microbial entity can be isolated from a fruit or vegetable, e.g., a pickled food or a fermented food. In certain embodiments, the first microbial entity is isolated from a raw agricultural product. In certain embodiments, the first microbial entity is isolated from edible tissues of an agricultural product, and/or from an extract, fraction, tissue, or portion of an agricultural product.

[0153] In certain embodiments, the first and/or second microbial entity is a generally regarded as safe (GRAS) probiotic microorganism or probiotic microorganism approved for human consumption. In certain embodiments, the second microbial entity is Lactobacillus plantarum or Lactobacillus brevis.

[0154] In certain embodiments, at least one of the microbial entities of the composition is selected from the group consisting of: Lactiplantibacillus plantarum, a Lactobacillus acidophilus, a Lacticaseibacillus casei, a Lacticaseibacillus rhamnosus, a Lacticaseibacillus paracasei, a Lentilactobacillus buchneri, a Levilactobacillus brevis, a Bacillus subtilis, a Bacillus licheniformis, a Weizmannia coagulans, Saccharomyces cerevisiae, and Saccharomyces cerevisiae var. boulardii (also referred to as Saccharomyces boulardii). In certain embodiments, the microbial entity is a generally regarded as safe (GRAS) probiotic microorganism, and/or the microbial entity is approved for human consumption. In certain embodiments, the microbial entity is Lactiplantibacillus plantarum. In certain embodiments, the microbial entity is Levilactobacillus brevis.

[0155] In certain embodiments, the microbial entities in the composition are isolated from a plant-based sample, and/or the microbe is selected from the group consisting of: Bacillus endophyticus, Bacillus amyloliquefaciens, Bacillus subtilis, Bacillus safensis, Bacillus pumilus, Bacillus paralicheniformis, Bacillus amyloliquefaciens, Bacillus axarquiensis, Bacillus megaterium, Bacillus aryabhattai, Pichia membranifaciens, Pichia kudriavzevii, Pichia terricola, Saccharomyces cerevisiae, Saccharomyces boulardii, Kluyveromyces marxianus, Talaromyces atroroseus, Debaryomyces hansenii, Candida akabanensis, Clavispora sp., Candida dosseyi, Meyerozyma guilliermondii, Lentilactobacillus buchneri, Lacticaseibacillus casei, Lactobacillus acidophilus, Leuconostoc mesenteroides, Leuconostoc pseudomesenteroides, Lactiplantibacillus plantarum, Schleiferilactobacillus harbinensis, Pediococcus parvulus, Pediococcus ethanolidurans, Pediococcus pentosaceus, Pediococcus paracasei, Galactomyces geotrichum, Nakazawaea ishiwadae, Streptococcus thermophilus, Weisella cibaria, Kazachstania servazzii, Pichia fermentans, and Holermanniella takashimae.

[0156] In certain embodiments, the first microbial entity is Lacticaseibacillus casei, and the second microbial entity is selected from Bacillus endophyticus, Bacillus amyloliquefaciens, Bacillus subtilis, Pichia membranifaciens, Pichia kudriavzevii, Pichia fermentans, Bacillus safensis, Bacillus pumilus, and Bacillus paralicheniformis.

[0157] In certain embodiments, the first microbial entity is Lactiplantibacillus plantarum, and the second microbial entity is selected from Bacillus safensis, Bacillus subtilis, Saccharomyces cerevisiae, Pichia kudriavzevii, Saccharomyces boulardii, and Kluyveromyces marxianus.

[0158] In certain embodiments, the first microbial entity is Lacticaseibacillus paracasei, and the second microbial entity is selected from Kluyveromyces marxianus and Saccharomyces boulardii.

[0159] In certain embodiments, the first microbial entity is Lacticaseibacillus rhamnosus, and the second microbial entity is Kluyveromyces marxianus.

[0160] In certain embodiments, the first microbial entity is Lentilactobacillus buchneri, and the second microbial entity is selected from Bacillus subtilis, Bacillus amyloliquefaciens, Bacillus amyloliquefaciens, Bacillus safensis, Bacillus axarquiensis, Talaromyces atroroseus, Kluyveromyces marxianus or Saccharomyces boulardii.

[0161] In certain embodiments, the first microbial entity is Lentilactobacillus acidophilus, and the second microbial entity is selected from Bacillus axarquiensis, Bacillus amyloliquefaciens, Bacillus subtilis, and Saccharomyces boulardii.

[0162] In certain embodiments, the first microbial entity is Levilactobacillus brevis, and the second microbial entity is Holermanniella takashimae.

[0163] In certain embodiments, the first microbial entity is Bacillus subtilis, and the second microbial entity is selected from Lentilactobacillus buchneri, Pediococcus parvulus, Lacticaseibacillus casei, Pediococcus ethanolidurans, Leuconostoc mesenteroides, Lactiplantibacillus plantarum, Schleiferilactobacillus harbinensis, Pichia membranifaciens, Pichia kudriavzevii, Meyerozyma guilliermondii, Holermanniella takashimae, Lactobacillus acidophilus, Galactomyces geotrichum, Candida akabanensis, Nakazawaea ishiwadae, and Saccharomyces cerevisiae.

[0164] In certain embodiments, the first microbial entity is Bacillus licheniformis, and the second microbial entity is Schleiferilactobacillus harbinensis or Pediococcus ethanolidurans.

[0165] In certain embodiments, the first microbial entity is Saccharomyces cerevisiae, and the second microbial entity is selected from Bacillus pumilus, Bacillus subtilis, Bacillus amyloliquefaciens Lactiplantibacillus plantarum, or Leuconostoc mesenteroides.

[0166] In certain embodiments, the first microbial entity is Saccharomyces boulardii, and the second microbial entity is selected from Lentilactobacillus buchneri, Pediococcus ethanolidurans, Lactobacillus harbinensis, Lactiplantibacillus plantarum, Lactobacillus acidophilus, Exiguobacterium sp., Pediococcus paracasei, Pediococcus pentosaceus and Lacticaseibacillus paracasei.

[0167] In certain embodiments, the first microbial entity is Lacticaseibacillus casei, and the second microbial entity is selected from Pichia membranifaciens, Pichia fermentans, Pichia kudriavzevii, Bacillus atrophaeus, and Bacillus licheniformis.

[0168] In certain embodiments, the first microbial entity is Lacticaseibacillus paracasei, and the second microbial entity is selected from Bacillus subtilis, Bacillus amyloliquefaciens, Kluyveromyces marxianus, Bacillus atrophaeus, and Saccharomyces boulardii.

[0169] In certain embodiments, the first microbial entity is Lactiplantibacillus plantarum, and the second microbial entity is selected from Saccharomyces bouldardii, Kluyveromyces marxianus, Bacillus subtilis, Holermanniella takashimae, Bacillus pumilus, Talaromyces atroroseus, and Pichia terricola.

[0170] In certain embodiments, the first microbial entity is Lentilactobacillus buchneri, and the second microbial entity is selected from Saccharomyces boulardii and Kluyveromyces marxianus.

[0171] In certain embodiments, the first microbial entity is Lentilactobacillus acidophilus, and the second microbial entity is selected from Talaramyces atroroseus and Bacillus amyloliquefaciens.

[0172] In certain embodiments, the first microbial entity is Lacticaseibacillus rhamnosus, and the second microbial entity is Saccharomyces boulardii or Talaromyces atroroseus.

[0173] In certain embodiments, the first microbial entity is Bacillus subtilis, and the second microbial entity is selected from Leuconostoc pseudomesenteroides, Saccharomyces boulardii, Pediococcus ethanolidurans, Pediococcus pentosaceus, Lactiplantibacillus plantarum, Pichia membranifaciens, Pichia fermentans, Talaromyces atroroseus, Debaryomyces hansenii, Candida dosseyi, Streptococcus thermophilus, and Weisella cibaria.

[0174] In certain embodiments, the first microbial entity is Bacillus licheniformis, and the second microbial entity is Lacticaseibacillus casei.

[0175] In certain embodiments, the first microbial entity is Weizmannia coagulans, and the second microbial entity is Pichia fermentans or Saccharomyces cerevisiae.

[0176] In certain embodiments, the first microbial entity is Saccharomyces cerevisiae, and the second microbial entity is selected from Lactococcus lactis or Bacillus amyloliquefaciens.

[0177] In certain embodiments, the first microbial entity is Saccharomyces boulardii, and the second microbial entity is selected from Lentilactobacillus buchneri, Pediococcus ethanolidurans, Lacticaseibacillus rhamnosus, Pediococcus ethanolidurans, Lactiplantibacillus plantarum, Bacillus amyloliquefaciens, Bacillus subtilis, Bacillus amyloliquefaciens, and Bacillus aryabhattai.

[0178] In certain embodiments, the first microbial entity is Lacticaseibacillus casei, and the second microbial entity is selected from Bacillus subtilis and Bacillus safensis.

[0179] In certain embodiments, the first microbial entity is Lentilactobacillus buchneri, and the second microbial entity is selected from Bacillus subtilis and Bacillus amyloliquefaciens.

[0180] In certain embodiments, the first microbial entity is Bacillus subtilis, and the second microbial entity is selected from Pediococcus pentosaceus, Pichia membranifaciens, Holermanniella takashimae, Lacticaseibacillus casei, Lentilactobacillus buchneri, Lacticaseibacillus casei, and Debaryomyces hansenii.

[0181] In certain embodiments, the first microbial entity is Saccharomyces boulardii, and the second microbial entity is Bacillus amyloliquefaciens.

[0182] In certain embodiments, the first microbial entity is Lacticaseibacillus casei, and the second microbial entity is selected from Bacillus licheniformis, Bacillus paralicheniformis, Bacillus endophyticus, and Bacillus subtilis.

[0183] In certain embodiments, the first microbial entity is Lactiplantibacillus plantarum, and the second microbial entity is selected from Bacillus licheniformis, Bacillus paralicheniformis, Bacillus mojavensis, and Bacillus subtilis.

[0184] In certain embodiments, the first microbial entity is Lentilactobacillus buchneri, and the second microbial entity is selected from Bacillus axarquiensis and Bacillus subtilis.

[0185] In certain embodiments, the first microbial entity is Lentilactobacillus acidophilus, and the second microbial entity is selected from Candida akabanensis, Pichia terricola, Debaryomyces hansenii, and Candida dosseyi.

[0186] In certain embodiments, the first microbial entity is Levilactobacillus brevis, and the second microbial entity is Bacillus subtilis.

[0187] In certain embodiments, the first microbial entity is Bacillus subtilis, and the second microbial entity is selected from Kazachstania servazzii, Kluyveromyces marxianus, Leuconostoc mesenteroides, Pediococcus parvulus, Leuconostoc pseudomesenteroides, Lactiplantibacillus plantarum, Lactiplantibacillus casei, Lentilactobacillus buchneri, Pediococcus pentosaceus, Pichia fermentans, Pichia kudriavzevii, Galactomyces geotrichum, Clavispora sp., Holermanniella takashimae, Talaromyces atroroseus, Weisella cibaria, Debaryomyces hansenii, Candida dosseyi, Saccharomyces cerevisiae, Candida almanaticensis, and Nakazawaea ishiwadae.

[0188] In certain embodiments, the first microbial entity is Bacillus licheniformis, and the second microbial entity is selected from Lacticaseibacillus casei and Lactiplantibacillus plantarum.

[0189] In some aspects, the first microbial entity is Saccharomyces cerevisiae, and the second microbial entity is selected from Bacillus mojavensis, Bacillus subtilis, Bacillus amyloliquefaciens, and Bacillus megaterium.

[0190] Also provided for herein is a probiotic assemblage comprising a first purified microbial entity isolated from a first plant-based sample, a second purified microbial entity isolated from a second plant-based sample, wherein the first purified microbial entity is artificially-associated with the second purified microbial entity, and a third microbial entity, wherein the third microbial entity is a probiotic microorganism.

[0191] Also provided for herein is a probiotic composition comprising at least one probiotic microorganism, and at least one second microbial entity purified from a plant-based sample, optionally wherein the at least one second microbial entity is a species presented in Table 3 or Table 4, and wherein the at least one probiotic microorganism and the at least one second microbial entity are capable of combining with a food product to become a functional food. In certain embodiments, the composition further comprises a prebiotic polysaccharide or a prebiotic fiber providing a carrier for the probiotic composition and to enhance the taste and flavor properties of the food product. In certain embodiments, the composition further comprises a prebiotic polysaccharide or a prebiotic fiber in dry or liquid form, wherein the prebiotic polysaccharide or the prebiotic fiber acts as a cryoprotectant. In certain embodiments, the probiotic composition can be combined with a dairy product, optionally wherein the dairy product is selected from the group consisting of: yogurt, shake, smoothie, and cheese.

[0192] In certain embodiments, the microbes in a composition of the disclosure produce more short chain fatty acids (SCFAs), indole derivative compounds, or neurotransmitters when grown together than when cultured separately, optionally wherein growth on a chosen prebiotic sugar results in increased synergy compared to growth on rich medium lacking the chosen prebiotic.

[0193] In certain embodiments, microbes in a composition of the disclosure produce more colony forming units (CFUs) when grown together than when cultured separately in the same culture medium for the same period of time.

[0194] In certain embodiments, a microbial composition of the disclosure is capable of a first functional interaction. In certain embodiments, the first functional interaction comprises synthesis of a beneficial microbially-produced compound, e.g., a short chain fatty acid or a vitamin selected from the group consisting of: acetate, propionate, butyrate, vitamin B12, K2, folate, an indole derivative, a neurotransmitter, and combinations thereof.

### Prebiotics

[0195] Prebiotics, in accordance with the teachings of this disclosure, comprise compositions that promote the growth of beneficial bacteria in the intestines. Prebiotic substances can be consumed by a relevant probiotic microorganism, or otherwise assist in keeping the relevant probiotic microorganism alive or stimulate its growth. When consumed in an effective amount, prebiotics also beneficially affect a subject's naturally-occurring gastrointestinal microflora and thereby impart health benefits apart from just nutrition. Prebiotic foods enter the colon and serve as substrate for the endogenous bacteria, thereby indirectly providing the host with energy, metabolic substrates, and essential micronutrients. The body's digestion and absorption of prebiotic foods is dependent upon bacterial metabolic activity, which salvages energy for the host from nutrients that escaped digestion and absorption in the small intestine.

[0196] Prebiotics help probiotic microorganisms flourish in the gastrointestinal tract, and accordingly, their health benefits are largely indirect. Metabolites generated by colonic fermentation by intestinal microflora, such as short-chain fatty acids, can play important functional roles in the health of the host. Prebiotics can be useful agents for enhancing the ability of intestinal microflora to provide benefits to their host.

[0197] Prebiotics, in accordance with the embodiments of this disclosure, include, without limitation, mucopolysaccharides, oligosaccharides, polysaccharides, amino acids, vitamins, nutrient precursors, proteins, and combinations thereof.

[0198] According to particular embodiments, compositions comprise a prebiotic comprising a dietary fiber, including, without limitation, polysaccharides and oligosaccharides. These compounds have the ability to increase the number of probiotic microorganisms, and augment their associated benefits. For example, an increase of beneficial Bifidobacteria likely changes the intestinal pH to support the increase of Bifidobacteria, thereby decreasing pathogenic microorganisms.

[0199] Non-limiting examples of oligosaccharides that are categorized as prebiotics in accordance with particular embodiments include galactooligosaccharides, fructooligosaccharides, inulins, isomalto-oligosaccharides, lactilol, lactosucrose, lactulose, pyrodextrins, soy oligosaccharides, transgalacto-oligosaccharides, and xylo-oligosaccharides.

[0200] According to other particular embodiments, compositions comprise a prebiotic comprising an amino acid.

[0201] Prebiotics are found naturally in a variety of foods including, without limitation, cabbage, bananas, berries, asparagus, garlic, wheat, oats, barley (and other whole grains), flaxseed, tomatoes, Jerusalem artichoke, onions and chicory, greens (e.g., dandelion greens, spinach, collard greens, chard, kale, mustard greens, turnip greens), and legumes (e.g., lentils, kidney beans, chickpeas, navy beans, white beans, black beans). Generally, according to particular embodiments, compositions comprise a prebiotic present in a sweetener composition or functional sweetened composition in an amount sufficient to promote health and wellness.

[0202] In particular embodiments, prebiotics also can be added to high-potency sweeteners or sweetened compositions. Non-limiting examples of prebiotics that can be used in this manner include fructooligosaccharides, xylooligosaccharides, galactooligosaccharides, and combinations thereof.

[0203] Many prebiotics have been discovered from dietary intake including, but not limited to: antimicrobial peptides, polyphenols, Okara (soybean pulp by product from the manufacturing of tofu), polydextrose, lactosucrose, malto-oligosaccharides, gluco-oligosaccharides (GOS), fructo-oligosaccharides (FOS), xantho-oligosaccharides, soluble dietary fiber in general. Types of soluble dietary fiber include, but are not limited to, psyllium, pectin, or inulin. Phytoestrogens (plant-derived isoflavone compounds that have estrogenic effects) have been found to have beneficial growth effects of intestinal microbiota through increasing microbial activity and microbial metabolism by increasing the blood testosterone levels, in humans and farm animals. Phytoestrogen compounds include but are not limited to: Oestradiol, Daidzein, Formononetin, Biochainin A, Genistein, and Equol.

[0204] Dosage for the compositions described herein are deemed to be “effective doses,” indicating that the probiotic or prebiotic composition is administered in a sufficient quantity to alter the physiology of a subject in a desired manner. In some embodiments, the desired alterations include reducing obesity, and or metabolic syndrome, and sequelae associated with these conditions. In some embodiments, the desired alterations are promoting rapid weight gain in livestock. In some embodiments, the prebiotic and probiotic microorganism compositions are given in addition to an anti-diabetic regimen.

[0205] In certain embodiments, the prebiotic contains a fiber and said fiber is oligofructose, or derived from a fiber source rich in oligofructose. In certain embodiments, the prebiotic is a dried fruit or vegetable powder.

[0206] In certain embodiments, the prebiotic compound is capable of being metabolized by at least one of the viable microbial entities present in the probiotic composition. In certain embodiments, the prebiotic compound is capable of being metabolized by the first or the second microbial entity. In certain embodiments, the prebiotic compound is capable of being metabolized to produce acetate, propionate, butyrate, or combinations thereof.

[0207] In certain embodiments, the composition further comprises a prebiotic polysaccharide or a prebiotic fiber. The prebiotic polysaccharide can be, for example, oligofructose or fructooligosaccharide. In certain embodiments, the prebiotic polysaccharide comprises a plant or plant extract. In certain embodiments, the prebiotic polysaccharide or the prebiotic fiber is capable of being metabolized by at least one of the microbial entities present in the probiotic composition, optionally by the first and/or the second microbial entities. In certain embodiments, the prebiotic polysaccharide or the prebiotic fiber is capable of being metabolized to produce acetate, propionate, butyrate or combinations thereof.

[0208] In certain embodiments, the prebiotic polysaccharide or the prebiotic fiber is in powdered form, and optionally provides flavorings, and wherein the prebiotic polysaccharide or the prebiotic fiber is capable of being mixed in a liquid to flavor the liquid, optionally wherein the flavor is selected from the group consisting of grape, strawberry, cranberry, blueberry, lime, lemon, and chocolate. In certain embodiments, the prebiotic polysaccharide or the prebiotic fiber comprises a plant or plant extract in the form of a juice, smoothie, shake, dry powder, tablet, granules, pellet, emulsion, paste, jelly, ferment, syrup, or brine. In some aspects, the prebiotic polysaccharide or the prebiotic fiber is derived from an agricultural product farmed using organic practices.

### Methods of Use

Combinations with Additional Probiotic Microorganisms

[0209] The disclosure relates, inter alia, to rationally-designed probiotic compositions for enhancement of probiotic microorganisms, or formulated with additional probiotic microorganisms to produce upgraded probiotic assemblages. The use of probiotics in general is additional in the art, and one of skill in the art would understand that the methods described herein could be used to improve the efficacy of diverse probiotic compositions. Additional bacteria used as probiotic microorganisms are strains of Lactobacillus and Bifidobacterium. Lactobacillus species of interest include, but are not limited to, Lactobacillus reuteri, Lactobacillus paracasei, Lactobacillus salivarius Lactobacillus plantarum, Lactobacillus acidophilus, Lactobacillus reuteri protectis, Lactobacillus bulgaricus, Lactobacillus rhamnosus, Lactobacillus casei, and Lactobacillus delbreukeii. Bifidobacterial species of interest include, but are not limited to, Bifidobacterium infantis, Bifidobacterium longum, Bifidobacterium bifidum and Bifidobacterium breve. Other probiotic microorganisms of interest include Streptococcus thermophilus, Escherichia coli Nissle, Lactococcus lactis, Bacillus subtilis, Bacillus clausii, Bacillus coagulans, Clostridium butyricum, Akkermansia muciniphila, Hafnia alvei, Saccharomyces cerevisiae and Saccharomyces cerevisiae var. boulardii (alternatively referred to as Saccharomyces boulardii).

[0210] In some embodiments, the probiotic compositions described herein are formulated with one or more of the strains above, or strains substantially similar thereto. In some embodiments, the probiotic composition described herein is formulated for consumption along with a regimen comprising one or more of the strains above, or strains substantially similar thereto.

### Timing and Dose of Probiotic Microorganisms and Prebiotics

[0211] In certain embodiments, probiotic microorganisms, such as Lactobacillus, Leuconostoc, Pediococcus, Saccharomyces, Bacillus, Pichia, Lacticaseibacillus, or Lactiplantibacillus are given prior to beginning treatment with a prebiotic compound. In an embodiment, probiotic microorganisms, such as L. mesenteroides, B. subtilis, S. cerevisiae, L. casei, P. ethanolidurans, P. membranifaciens, and/or L. plantarum are given in conjunction with treatment with a prebiotic (e.g., comprising or consisting essentially of FOS, GOS, or other appropriate polysaccharide), for part or all of the duration of treatment with the prebiotic. Thus, in an embodiment, some or all doses of a prebiotic compound (e.g., comprising or consisting essentially of FOS, GOS, or other appropriate polysaccharide) are accompanied by a dose of bacteria or fungi, e.g., live cultured bacteria or fungi, e.g., L. mesenteroides, B. subtilis, S. cerevisiae, L. casei, P. ethanolidurans, P. membranifaciens, and/or L. plantarum. In an embodiment, bacteria or fungi, e.g., L. mesenteroides, B. subtilis, S. cerevisiae, L. casei, P. ethanolidurans, P. membranifaciens, and/or L. plantarum are given initially with a prebiotic (e.g., comprising or consisting essentially of FOS, GOS, or other appropriate polysaccharide), but then use of the probiotic microorganism is discontinued. For example, the initial one, two, three, four, five, six, seven, eight, nine, ten, or more than ten days of treatment with a prebiotic (e.g., comprising or consisting essentially of FOS, GOS, or other appropriate polysaccharide) further comprises doses of bacteria or fungi, with the use of bacteria or fungi discontinued after that time. In an embodiment, bacteria or fungi, (e.g., bacteria in yogurt), or bacteria or fungi by themselves, can be given for the first two days of treatment; then the administration of bacteria or fungi is discontinued. In another embodiment, probiotic microorganisms, either alone or in combination with other substances or treatments, are used after the treatment with a prebiotic compound (comprising or consisting essentially of FOS, GOS, or other appropriate polysaccharide) is terminated. The bacteria or fungi can be taken for any suitable period after the termination of treatment with prebiotic and can be taken daily or at regular or irregular intervals. Doses can be as described below.

[0212] Any suitable amount of a probiotic microorganism per serving can be used that allows an effective microbiota in the GI as demonstrated by a reduction in weight or amelioration of other signs of metabolic syndrome measured by insulin resistance, HbA1c, body mass index (BMI), visceral adiposity, dyslipidemia, or bone mineral density. Typically, probiotic microorganisms are given as live cultured microorganisms. Herein measurement is mg indicate dry weight of purified bacteria or fungi. The dose can be about 0.001 mg to about 1 mg, or about 0.5 mg to about 5 mg, or about 1 mg to about 1000 mg, or about 2 mg to about 200 mg, or about 2 mg to about 100 mg, or about 2 mg to about 50 mg, or about 4 mg to about 25 mg, or about 5 mg to about 20 mg, or about 10 mg to about 15 mg, or about 50 mg to about 200 mg, or about 200 mg to about 1000 mg, or about 10, 11, 12, 12.5, 13, 14, or 15 mg per serving. The probiotic microorganisms can also be about 0.5% w/w to about 20% w/w of the final composition. The dose of probiotic microorganisms can be given in combination with one or more prebiotics. Another common way of specifying the amount of probiotic microorganisms is as a colony forming unit (cfu). In an embodiment, one or more strains of probiotic microorganism are ingested in an amount of about 1×10\hat{ }6 to about 1×10\hat{ }9 cfu's, or about 1×10\hat{ }6 cfu's to about 1×10\hat{ }9 cfu's, or about 10×10\hat{ }6 cfu's to about 0.5×10\hat{ }9 cfu's, or about 113×10\hat{ }5 cfu's to about 113×10\hat{ }6 cfu's, or about 240×10\hat{ }5 cfu's to about 240×10\hat{ }6 cfu's, or about 0.3×10\hat{ }9 cfu's per serving. In another embodiment, one or more strains of probiotic microorganism are administered as part of a dairy product. In an embodiment, a typical serving size for a dairy product such as fluid milk is about 240 g. In other embodiments, a serving size is about 245 g, or about 240 g to about 245 g, or about 227 to about 300 g. In an embodiment the dairy product is yogurt. Yogurt can have a serving size of about 4 oz, or about 6 oz, or about 8 oz, or about 4 oz to 10 oz, or about half cup, or about 1 cup, or about 113 g, or about 170 g, or about 227 g, or about 245 g or about 277 g, or about 100 g to about 350 g.

[0213] In an embodiment, probiotic microorganisms are given as live cultured bacteria or fungi, e.g., in combination with a prebiotic (e.g., comprising or consisting essentially of FOS, GOS, or other appropriate polysaccharide) and, optionally, other substances. The dose can be about 1 mg to about 1000 mg, or about 2 mg to about 200 mg, or about 2 mg to about 100 mg, or about 2 mg to about 50 mg, or about 4 mg to about 25 mg, or about 5 mg to about 20 mg, or about 10 mg to about 15 mg, or about 10, 11, 12, 12.5, 13, 14, or 15 mg of probiotic microorganismal cell culture dry weight. In an embodiment, as the administration of a prebiotic (e.g., comprising or consisting essentially of FOS, GOS, or other appropriate polysaccharide) dose to a subject increases, the dose of bacteria or fungi increases as well. For example, an initial dose of a prebiotic (e.g., comprising or consisting essentially of FOS, GOS, or other appropriate polysaccharides) can be about 0.6 g to 1.0 g, e.g., 0.8 g, given in combination with about 10-15 mg of probiotic microorganismal cell culture dry weight. The dose of a prebiotic (e.g., comprising or consisting essentially of FOS, GOS, or other appropriate polysaccharide) can be increased incrementally by about 0.6 g to 1.0 g, e.g., 0.8 g, and the accompanying dose of probiotic microorganismal cell culture dry weight can be increased by about 10-15 mg, e.g., about 12.5 mg.

### FOS, GOS, and Other Appropriate Polysaccharide Formulations

### A. Formulations Introduction

[0214] In an embodiment a prebiotic composition comprises inulin, FOS, lactulose, GOS, raffinose, stachyose, or a combination thereof. In addition, other plant-derived polysaccharides such as xylan, pectin, isomalto-oligosaccharides, gentio-oligosaccharides, 4-O-methyl glucuronoxylan (GX), neutral arabinoxylan (AX), heteroxylan (HX) can be combined with the probiotic microorganisms to enhance bacterial and fungal metabolic function. Some of these can be derived from plant material found in the plant host from which the probiotic microorganisms were isolated (i.e., the “cognate” plant). In some embodiments the prebiotics are thus adapted to be assimilated and digested by the accompanying probiotics in a manner that recapitulates the rich complexity and variety of polysaccharides present in the cognate plant and which play a role during digestion following its consumption of an animal.

[0215] In an embodiment a prebiotic composition comprises or consists of FOS, GOS, or other appropriate polysaccharide. In another embodiment a prebiotic composition comprises FOS, GOS, or other appropriate polysaccharide, in combination with one or more digestible saccharides. Digestible saccharides are saccharides that are digestible by humans and include, but are not limited to lactose, glucose, and galactose. In an embodiment a prebiotic composition comprises FOS, GOS, or other appropriate polysaccharide, and less than 20% weight/weight of one or more digestible saccharides (e.g. lactose, glucose, or galactose). In an embodiment a prebiotic composition comprises FOS, GOS, or other appropriate polysaccharide, and less than 10% of one or more digestible saccharides. In an embodiment a prebiotic composition comprises FOS, GOS, or other appropriate polysaccharide, and less than 5% of one or more digestible saccharides. In another embodiment a prebiotic composition contains less than 5% lactose. In another embodiment a prebiotic composition contains less than 4% lactose. In another embodiment a prebiotic composition contains less than 3% lactose. In another embodiment a prebiotic composition contains less than 2% lactose. In another embodiment a prebiotic composition contains less than 1% lactose. In another embodiment a prebiotic composition contains less than 0.5% lactose. In another embodiment a prebiotic composition contains less than 0.4% lactose. In another embodiment a prebiotic composition contains less than 0.3% lactose. In another embodiment a prebiotic composition contains less than 0.2% lactose. In another embodiment a prebiotic composition contains less than 0.1% lactose. In another embodiment a prebiotic composition contains less than 0.05% lactose. In another embodiment a prebiotic composition contains less than 0.01% lactose. In another embodiment a prebiotic composition contains less than 0.005% lactose. In an embodiment a prebiotic composition comprises FOS, GOS, or other appropriate polysaccharide, and essentially no lactose. In an embodiment a prebiotic composition does not contain any lactose. In another embodiment a prebiotic composition contains FOS, GOS, or other appropriate polysaccharide, and at least one probiotic microorganism. In another embodiment a prebiotic composition comprises FOS, GOS, or other appropriate polysaccharide, and optionally one or more of lactose, at least one probiotic microorganism, or a buffer. Additional ingredients include ingredients to improve handling, preservatives, antioxidants, flavorings and the like.

[0216] In an embodiment, a prebiotic composition comprises FOS, GOS, or other appropriate polysaccharide, or a probiotic. In other embodiment, a prebiotic composition is in the form of a powder, tablet, capsule, syrup, or liquid. In an embodiment, a prebiotic composition can be administered with a dairy product and is in the form of milk or other common dairy product such as a yogurt, shake, smoothie, cheese, and the like.

[0217] In embodiments where a prebiotic composition comprises less than 100% by weight of FOS, GOS, or other appropriate polysaccharide, the remaining ingredients can be any suitable ingredients intended for the consumption of the subject in need thereof, e.g., human, including, but not limited to, other prebiotics (e.g., FOS), a buffer, one or more digestible saccharides (e.g. lactose, glucose, or galactose), ingredients intended to inhibit clumping and increase pourability, such as silicone dioxide and microcrystalline cellulose, or similar ingredients as are well-additional in the art. Remaining ingredients can also include ingredients to improve handling, preservatives, antioxidants, flavorings, and the like.

### B. Buffer Components

[0218] One or more buffers, optionally with a calcium counter ion, can also be administered in methods and compositions described herein. Any buffer suitable for consumption by the subject being treated, e.g., human, are useful for the compositions herein. The buffer can partially or wholly neutralize stomach acidity, which can, e.g., allow live bacteria or fungi to reach the gut. Buffers include citrates, phosphates, and the like. One embodiment utilizes a buffer with a calcium counter ion, such as Calcium Phosphate Tribasic. The calcium can serve to restore the calcium that many lactose intolerant subjects are missing in their diet. Calcium phosphate can protect Lactobacillus spp. from bile.

[0219] In an embodiment, a buffer such as calcium phosphate is given prior to beginning treatment with a prebiotic composition (such as a composition comprising or consisting essentially of FOS, GOS, or other appropriate polysaccharide), optionally in conjunction with administration of bacteria or fungi. In an embodiment, a buffer such as calcium phosphate is given in conjunction with treatment with a prebiotic composition (e.g., a composition comprising or consisting essentially of FOS, GOS, or other appropriate polysaccharide), for part or all of the treatment with lactose. Thus, in an embodiment, some or all doses of a prebiotic composition are accompanied by a dose of a buffer such as calcium phosphate. In an embodiment, a buffer such as calcium phosphate is given initially with a prebiotic composition (such as a composition comprising or consisting essentially of FOS, GOS, or other appropriate polysaccharide), but then the buffer use is discontinued. For example, the initial one, two, three, four, five, six, seven, eight, nine, ten, or more than ten days of treatment with a prebiotic composition can include doses of a buffer such as calcium phosphate, with the use of the buffer discontinued after that time. In an embodiment, a buffer such as calcium phosphate can be given for the first two days of treatment, and then the administration of buffer is discontinued. In an embodiment, a buffer such as calcium phosphate, either alone or in combination with other substances or treatments is used after the treatment with a prebiotic composition is terminated. A buffer such as calcium phosphate can be taken for any suitable period after the termination of treatment with lactose, and can be taken daily or at regular or irregular intervals. Doses can be as described below.

[0220] Numerous buffers suitable for human consumption are known in the art, and any suitable buffer can be used in the methods and compositions described herein. Calcium triphosphate is an exemplary buffer, and its counterion supplies a nutrient that is often lacking in lactose-intolerant subjects, i.e., calcium. In an embodiment a buffer can be used in a dose from about 2 mg to about 2000 mg, or about 4 mg to about 400 mg, or about 4 mg to about 200 mg, or about 4 mg to about 100 mg, or about 8 mg to about 50 mg, or about 10 mg to about 40 mg, or about 20 mg to about 30 mg, or about 20, 21, 22, 23, 24, 25, 26, 27, 28, 29, or 30 mg. In another embodiment a prebiotic composition further comprises an amount of a buffer from 1-50 mg, such as about 1, 2, 3, 4, 5, 6, 7, 8, 9, 10, 11, 12, 13, 14, 15, 16, 17, 18, 19, 20, 21, 22, 23, 24, 25, 26, 27, 28, 29, 30, 31, 32, 33, 34, 35, 36, 37, 38, 39, 40, 41, 42, 43, 44, 45, 46, 47, 48, 49, or 50 mg. In an embodiment, buffer is used in a dose of about 25 mg. In an embodiment, calcium phosphate is used in a dose of about 25 mg. The dose can be given in combination with a prebiotic composition (e.g., a composition comprising or consisting essentially of FOS, GOS, or other appropriate polysaccharide). In an embodiment, as a prebiotic composition dose increases, the dose of buffer increases as well. For example, an initial dose of a prebiotic composition can be about 0.6 g to 1.0 g, e.g., 0.8 g, given in combination with about 20-30 mg, e.g., about 25 mg, of buffer, e.g., calcium phosphate. The dose of a prebiotic composition can be increased incrementally by about 0.6 g to 1.0 g, e.g., 0.8 g, and the accompanying dose of buffer, e.g., calcium phosphate, can be increased by about 20-30 mg, e.g., about 25 mg, of buffer, e.g., calcium phosphate.

### C. Compositions Comprising GOS and at Least One Probiotic Microorganism

[0221] In an embodiment, a prebiotic composition comprises FOS, GOS, or other appropriate polysaccharide, and at least one probiotic microorganism. The FOS, GOS, or other appropriate polysaccharide can comprise more than 1% of the weight of the composition while the at least one probiotic microorganism will typically comprise less than about 10%, 5%, 4%, 3%, or 2% by weight of the compositions. For example, the FOS, GOS, or other appropriate polysaccharide can be present at about 1-99.75% by weight and the at least one probiotic microorganism at about 0.25-2% by weight, or the FOS, GOS, or other appropriate polysaccharide can be present at about 89-96% by weight and the bacteria or fungi at about 1.2-3.7% by weight. In an embodiment, FOS, GOS, or other appropriate polysaccharide are present at about 92% by weight and at least one probiotic microorganism, (e.g., members from Table 3 or Table 4), is present at about 1.5% by weight. In an embodiment, FOS, GOS, or other appropriate polysaccharide are present at about 92% by weight and at least one probiotic microorganism, (e.g., members from Table 3 or Table 4), is present at about 1.5% by weight. In another embodiment, FOS, GOS, or other appropriate polysaccharide are present at about 93% by weight and at least one probiotic microorganism, (e.g., members from Table 3 or Table 4), is present at about 1.5% by weight. In another embodiment, FOS, GOS, or other appropriate polysaccharide are present at about 94% by weight and at least one probiotic microorganism, (e.g., members from Table 3 or Table 4), is present at about 1.5% by weight. In another embodiment, FOS, GOS, or other appropriate polysaccharide are present at about 95% by weight and at least one probiotic microorganism, (e.g., members from Table 3 or Table 4), is present at about 1.5% by weight. In another embodiment, FOS, GOS, or other appropriate polysaccharide are present at about 96% by weight and at least one probiotic microorganism, (e.g., members from Table 3 or Table 4), is present at about 1.5% by weight. In another embodiment, FOS, GOS, or other appropriate polysaccharide are present at about 97% by weight and at least one probiotic microorganism, (e.g., members from Table 3 or Table 4), is present at about 1.5% by weight. In another embodiment, FOS, GOS, or other appropriate polysaccharide are present at about 98% by weight and at least one probiotic microorganism, (e.g., members from Table 3 or Table 4), is present at about 1.5% by weight. In another embodiment, FOS, GOS, or other appropriate polysaccharide are present at about 98.5% by weight and at least one probiotic microorganism, (e.g., members from Table 3 or Table 4), is present at about 1.5% by weight. If the at least one probiotic microorganism and FOS, GOS, or other appropriate polysaccharide do not make up 100% by weight of the prebiotic composition, the remaining ingredients can be any suitable ingredients intended for consumption by the subject in need thereof, e.g., human, including, but not limited to, other prebiotics (e.g., FOS), one or more buffers, digestible saccharides (e.g. lactose, glucose, or galactose), ingredients intended to inhibit clumping and increase pourability, such as silicone dioxide and microcrystalline cellulose, or similar ingredients as are well-additional in the art. Remaining ingredients can also include ingredients to improve handling, preservatives, antioxidants, flavorings and the like.

### D. Compositions Comprising FOS, GOS, or Other Appropriate Polysaccharide and a Buffer

[0222] In another embodiment, a prebiotic composition comprises FOS, GOS, or other appropriate polysaccharide and a buffer (e.g., calcium phosphate tribasic). For example, FOS, GOS, or other appropriate polysaccharide can be present at about 1-100% by weight and the buffer at about 0.50-4% by weight, or FOS, GOS, or other appropriate polysaccharide can be present at about 1-96% by weight and the buffer at about 1 to about 3.75% by weight. In an embodiment, FOS, GOS, or other appropriate polysaccharide are present at about 1% by weight and buffer is present at about 3% by weight. In an embodiment, FOS, GOS, or other appropriate polysaccharide are present at about 5% by weight and buffer is present at about 3% by weight. In an embodiment, FOS, GOS, or other appropriate polysaccharide are present at about 10% by weight and buffer is present at about 3% by weight. In an embodiment, FOS, GOS, or other appropriate polysaccharide are present at about 15% by weight and buffer is present at about 15% by weight. In an embodiment, FOS, GOS, or other appropriate polysaccharide are present at about 20% by weight and buffer is present at about 3% by weight. In an embodiment, FOS, GOS, or other appropriate polysaccharide are present at about 25% by weight and buffer is present at about 3% by weight. In an embodiment, FOS, GOS, or other appropriate polysaccharide are present at about 30% by weight and buffer is present at about 3% by weight. In an embodiment, FOS, GOS, or other appropriate polysaccharide are present at about 35% by weight and buffer is present at about 3% by weight. In an embodiment, FOS, GOS, or other appropriate polysaccharide are present at about 40% by weight and buffer is present at about 3% by weight. In an embodiment, FOS, GOS, or other appropriate polysaccharide are present at about 50% by weight and buffer is present at about 3% by weight. In an embodiment, FOS, GOS, or other appropriate polysaccharide are present at about 60% by weight and buffer is present at about 3% by weight. In an embodiment, FOS, GOS, or other appropriate polysaccharide are present at about 70% by weight and buffer is present at about 3% by weight. In another embodiment, FOS, GOS, or other appropriate polysaccharide are present at about 90% by weight and buffer is present at about 3% by weight. In another embodiment, FOS, GOS, or other appropriate polysaccharide are present at about 92% by weight and buffer is present at about 3% by weight. In another embodiment, FOS, GOS, or other appropriate polysaccharide are present at about 93% by weight and buffer is present at about 3% by weight. In another embodiment, FOS, GOS, or other appropriate polysaccharide are present at about 94% by weight and buffer is present at about 3% by weight. In another embodiment, FOS, GOS, or other appropriate polysaccharide are present at about 95% by weight and buffer is present at about 3% by weight. In another embodiment, FOS, GOS, or other appropriate polysaccharide are present at about 96% by weight and buffer is present at about 3% by weight. In another embodiment, FOS, GOS, or other appropriate polysaccharide are present at about 97% by weight and buffer is present at about 2% by weight. In another embodiment, FOS, GOS, or other appropriate polysaccharide are present at about 98% by weight and buffer is present at about 1% by weight. In another embodiment, FOS, GOS, or other appropriate polysaccharide are present at about 99% by weight and buffer is present at about 1% by weight. In another embodiment, FOS, GOS, or other appropriate polysaccharide are present at about 100% by weight and buffer is present at less than about 1% by weight. If the buffer and FOS, GOS, or other appropriate polysaccharide do not make up 100% by weight of the composition, the remaining ingredients can be any suitable ingredients intended for consumption by the subject (e.g., a human) including, but not limited to, probiotic microorganisms (e.g., beneficial bacteria) or other prebiotics (e.g., FOS), but also including ingredients intended to inhibit clumping and increase pourability, such as silicone dioxide and microcrystalline cellulose, or similar ingredients as are well-additional in the art. Remaining ingredients can also include ingredients to improve handling, preservatives, antioxidants, flavorings and the like.

[0223] E. Compositions Comprising a Digestible Saccharide, a Probiotic Microorganism, and FOS, GOS, or Other Appropriate Polysaccharide

[0224] In an embodiment, a prebiotic composition comprises a digestible saccharide (e.g. lactose, glucose, or galactose), a probiotic microorganism (e.g., members from Table 3 or Table 4), and FOS, GOS, or other appropriate polysaccharide. In an embodiment, lactose can be present at about 1-20% by weight, bacteria or fungi at about 0.25-20.10% by weight, and FOS, GOS, or other appropriate polysaccharide at about 1-98.75% by weight. In another embodiment lactose can be present at about 5-20% by weight, bacteria or fungi at about 0.91-1.95% by weight, and FOS, GOS, or other appropriate polysaccharide at about 1 to about 96% by weight. In another embodiment, lactose is present at about 20% by weight, bacteria or fungi at about 1.5% by weight, and FOS, GOS, or other appropriate polysaccharide are present at about 1% by weight. In another embodiment, lactose is present at about 20% by weight, bacteria or fungi at about 1.5% by weight, and FOS, GOS, or other appropriate polysaccharide are present at about 50% by weight. In another embodiment, lactose is present at about 20% by weight, bacteria or fungi at about 1.5% by weight, and FOS, GOS, or other appropriate polysaccharide are present at about 60% by weight. In another embodiment, lactose is present at about 20% by weight, bacteria or fungi at about 1.5% by weight, and FOS, GOS, or other appropriate polysaccharide are present at about 70% by weight. In another embodiment, lactose is present at about 5% by weight, bacteria or fungi at about 1.5% by weight, and FOS, GOS, or other appropriate polysaccharide are present at about 90% by weight. In another embodiment, lactose is present at about 5% by weight, bacteria or fungi at about 1.5% by weight, and FOS, GOS, or other appropriate polysaccharide are present at about 92% by weight. In another embodiment, lactose is present at about 5% by weight, bacteria or fungi at about 1.5% by weight, and FOS, GOS, or other appropriate polysaccharide are present at about 93% by weight. In another embodiment, lactose is present at about 5% by weight, bacteria or fungi at about 1% by weight, and FOS, GOS, or other appropriate polysaccharide are present at about 94% by weight. In another embodiment, lactose is present at about 4.5% by weight, bacteria or fungi at about 1.5% by weight, and FOS, GOS, or other appropriate polysaccharide are present at about 94% by weight. In another embodiment, lactose is present at about 4.5% by weight, bacteria or fungi at about 0.5% by weight, and FOS, GOS, or other appropriate polysaccharide are present at about 95% by weight. In another embodiment, lactose is present at about 3.5% by weight, bacteria or fungi at about 0.5% by weight, and FOS, GOS, or other appropriate polysaccharide are present at about 96% by weight. In another embodiment, lactose is present at about 2.5% by weight, bacteria or fungi at about 0.5% by weight, and FOS, GOS, or other appropriate polysaccharides are present at about 97% by weight. In another embodiment, lactose is present at about 1.5% by weight, bacteria or fungi at about 0.5% by weight, and FOS, GOS, or other appropriate polysaccharide are present at about 98% by weight. In another embodiment, lactose is present at about 0.5% by weight, bacteria or fungi at about 0.5% by weight, and FOS, GOS, or other appropriate polysaccharide are present at about 99% by weight. If the bacteria or fungi, FOS, GOS, or other appropriate polysaccharide and lactose do not make up 100% of the composition, the remaining ingredients can be any suitable ingredients intended for consumption by the subject, e.g., a human, including, but not limited to a buffer, digestible saccharides (e.g., lactose, glucose, or galactose), ingredients intended to inhibit clumping and increase pourability, such as silicone dioxide and microcrystalline cellulose, or similar ingredients as are well-additional in the art. Remaining ingredients can also include ingredients to improve handling, preservatives, antioxidants, flavorings and the like.

### F. Compositions Comprising FOS, GOS, or Other Appropriate Polysaccharide, a Probiotic Microorganism, and Buffer

[0225] In an embodiment, a prebiotic composition comprises FOS, GOS, or other appropriate polysaccharide, a probiotic microorganism, and buffer. In an embodiment, FOS, GOS, or other appropriate polysaccharide can be present at about 1-100% by weight, a probiotic microorganism at about 0.25-2% by weight, and the buffer at about 0.50-4% by weight. In another embodiment, FOS, GOS, or other appropriate polysaccharide can be present at about 1-95% by weight, a probiotic microorganism at about 0.91-1.95% by weight, and the buffer at about 1.2-30.75% by weight. In another embodiment, FOS, GOS, or other appropriate polysaccharide are present at about 1% by weight, a probiotic microorganism at about 1.5% by weight, and buffer is present at about 3% by weight. In another embodiment, FOS, GOS, or other appropriate polysaccharide are present at about 5% by weight, a probiotic microorganism at about 1.5% by weight, and buffer is present at about 3% by weight. In another embodiment, FOS, GOS, or other appropriate polysaccharide are present at about 10% by weight, a probiotic microorganism at about 1.5% by weight, and buffer is present at about 3% by weight. In another embodiment, FOS, GOS, or other appropriate polysaccharide are present at about 15% by weight, a probiotic microorganism at about 1.5% by weight, and buffer is present at about 3% by weight. In another embodiment, FOS, GOS, or other appropriate polysaccharide are present at about 20% by weight, a probiotic microorganism at about 1.5% by weight, and buffer is present at about 3% by weight. In another embodiment, FOS, GOS, or other appropriate polysaccharide are present at about 25% by weight, a probiotic microorganism at about 1.5% by weight, and buffer is present at about 3% by weight. In another embodiment, FOS, GOS, or other appropriate polysaccharide are present at about 30% by weight, a probiotic microorganism at about 1.5% by weight, and buffer is present at about 3% by weight. In another embodiment, FOS, GOS, or other appropriate polysaccharide are present at about 35% by weight, a probiotic microorganism at about 1.5% by weight, and buffer is present at about 3% by weight. In another embodiment, FOS, GOS, or other appropriate polysaccharide are present at about 40% by weight, a probiotic microorganism at about 1.5% by weight, and buffer is present at about 3% by weight. In another embodiment, FOS, GOS, or other appropriate polysaccharide are present at about 50% by weight, a probiotic microorganism at about 1.5% by weight, and buffer is present at about 3% by weight. In another embodiment, FOS, GOS, or other appropriate polysaccharide are present at about 60% by weight, a probiotic microorganism at about 1.5% by weight, and buffer is present at about 3% by weight. In another embodiment, FOS, GOS, or other appropriate polysaccharide are present at about 70% by weight, a probiotic microorganism at about 1.5% by weight, and buffer is present at about 3% by weight. In another embodiment, FOS, GOS, or other appropriate polysaccharide are present at about 90% by weight, a probiotic microorganism at about 1.5% by weight, and buffer is present at about 3% by weight. In another embodiment, FOS, GOS, or other appropriate polysaccharide are present at about 92% by weight, a probiotic microorganism at about 1.5% by weight, and buffer is present at about 3% by weight. In another embodiment, FOS, GOS, or other appropriate polysaccharide are present at about 93% by weight, a probiotic microorganism at about 1.5% by weight, and buffer is present at about 3% by weight. In another embodiment, FOS, GOS, or other appropriate polysaccharide are present at about 94% by weight, a probiotic microorganism at about 1.5% by weight, and buffer is present at about 3% by weight. In another embodiment, FOS, GOS, or other appropriate polysaccharide are present at about 95% by weight, a probiotic microorganism at about 1.5% by weight, and buffer is present at about 3% by weight. In another embodiment, FOS, GOS, or other appropriate polysaccharide are present at about 96% by weight, a probiotic microorganism at about 1.5% by weight, and buffer is present at about 2% by weight. In another embodiment, FOS, GOS, or other appropriate polysaccharide are present at about 97% by weight, a probiotic microorganism at about 1.5% by weight, and buffer is present at about 1.5% by weight. In another embodiment, FOS, GOS, or other appropriate polysaccharide are present at about 99% by weight, a probiotic microorganism at about 0.5% by weight, and buffer is present at about 0.5% by weight. In another embodiment, FOS, GOS, or other appropriate polysaccharide are present at about 100% by weight, a probiotic microorganism at less than about 0.5% by weight, and buffer is present at less than about 0.5% by weight. If the probiotic microorganism, buffer, and FOS, GOS, or other appropriate polysaccharide do not make up 100% of the composition, the remaining ingredients can be any suitable ingredients intended for the consumption of a subject (e.g., human) including, but not limited to, other prebiotics (e.g., FOS), digestible saccharides (e.g., lactose, glucose or galactose), ingredients intended to inhibit clumping and increase pourability, such as silicone dioxide and microcrystalline cellulose, or similar ingredients as are well-additional in the art. Remaining ingredients can also include ingredients to improve handling, preservatives, antioxidants, flavorings and the like.

### G. Compositions Comprising a Digestible Saccharide, FOS, GOS, or Other Appropriate Polysaccharide, and a Buffer

[0226] In an embodiment, a prebiotic composition comprises a digestible saccharide (e.g. lactose, glucose, or galactose), FOS, GOS, or other appropriate polysaccharide, and a buffer. For example, lactose can be present at about 1-20% by weight, FOS, GOS, or other appropriate polysaccharide at about 1-100% by weight, and the buffer at about 0.50-4% by weight, or the lactose can be present at about 5-20% by weight, FOS, GOS, or other appropriate polysaccharide at about 1-96% by weight, and the buffer at about 1.2-30.75% by weight. In an embodiment, lactose is present at about 20% by weight, FOS, GOS, or other appropriate polysaccharide at about 1% by weight, and buffer is present at about 3% by weight. In an embodiment, lactose is present at about 5% by weight, FOS, GOS, or other appropriate polysaccharide at about 1% by weight, and buffer is present at about 3% by weight. In an embodiment, lactose is present at about 20% by weight, FOS, GOS, or other appropriate polysaccharide at about 10% by weight, and buffer is present at about 3% by weight. In an embodiment, lactose is present at about 20% by weight, FOS, GOS, or other appropriate polysaccharide at about 15% by weight, and buffer is present at about 3% by weight. In an embodiment, lactose is present at about 20% by weight, FOS, GOS, or other appropriate polysaccharide at about 20% by weight, and buffer is present at about 3% by weight. In an embodiment, lactose is present at about 20% by weight, FOS, GOS, or other appropriate polysaccharide at about 25% by weight, and buffer is present at about 3% by weight. In an embodiment, lactose is present at about 20% by weight, FOS, GOS, or other appropriate polysaccharide at about 30% by weight, and buffer is present at about 3% by weight. In an embodiment, lactose is present at about 20% by weight, FOS, GOS, or other appropriate polysaccharide at about 35% by weight, and buffer is present at about 3% by weight. In an embodiment, lactose is present at about 20% by weight, FOS, GOS, or other appropriate polysaccharide at about 40% by weight, and buffer is present at about 3% by weight. In an embodiment, lactose is present at about 20% by weight, FOS, GOS, or other appropriate polysaccharide at about 50% by weight, and buffer is present at about 3% by weight. In an embodiment, lactose is present at about 20% by weight, FOS, GOS, or other appropriate polysaccharide at about 60% by weight, and buffer is present at about 3% by weight. In an embodiment, lactose is present at about 20% by weight, FOS, GOS, or other appropriate polysaccharide at about 70% by weight, and buffer is present at about 3% by weight. In another embodiment, lactose is present at about 5% by weight, FOS, GOS, or other appropriate polysaccharide at about 90% by weight, and buffer is present at about 3% by weight. In another embodiment, lactose is present at about 5% by weight, FOS, GOS, or other appropriate polysaccharide at about 92% by weight, and buffer is present at about 3% by weight. In another embodiment, lactose is present at about 4% by weight, FOS, GOS, or other appropriate polysaccharide at about 93% by weight, and buffer is present at about 3% by weight. In another embodiment, lactose is present at about 3% by weight, FOS, GOS, or other appropriate polysaccharide at about 94% by weight, and buffer is present at about 3% by weight. In another embodiment, lactose is present at about 2% by weight, FOS, GOS, or other appropriate polysaccharide at about 95% by weight, and buffer is present at about 3% by weight. In another embodiment, lactose is present at about 1% by weight, FOS, GOS, or other appropriate polysaccharide at about 96% by weight, and buffer is present at about 3% by weight. If a suitable prebiotic, buffer and lactose do not make up 100% of the composition by weight, the remaining ingredients can be any suitable ingredients intended for consumption by a subject (e.g., human) including, but not limited to, bacteria or fungi, ingredients intended to inhibit clumping and increase pourability, such as silicone dioxide and microcrystalline cellulose, or similar ingredients as are well-additional in the art. Remaining ingredients can also include ingredients to improve handling, preservatives, antioxidants, flavorings and the like.

### H. Compositions Comprising a Digestible Saccharide, Bacteria, Fungi, GOS, and a Buffer

[0227] In an embodiment, a composition comprises a digestible saccharide (e.g. lactose, glucose, or galactose), bacteria or fungi, FOS, GOS, or other appropriate polysaccharide, and buffer. For example, lactose can be present at about 1-20% by weight, bacteria or fungi at about 0.25-2.10% by weight, FOS, GOS, or other appropriate polysaccharide at about 1-100% by weight, and the buffer at about 0.50-4% by weight, or the lactose can be present at about 5-20% by weight, bacteria or fungi at about 0.91-1.95% by weight, FOS, GOS, or other appropriate polysaccharide at about 70-95% by weight, and the buffer at about 1.2-30.75% by weight. In an embodiment, lactose is present at about 20% by weight, bacteria or fungi at about 1.47% by weight, FOS, GOS, or other appropriate polysaccharide at about 1% by weight, and buffer is present at about 3% by weight. In an embodiment, lactose is present at about 20% by weight, bacteria or fungi at about 1.47% by weight, FOS, GOS, or other appropriate polysaccharide at about 10% by weight, and buffer is present at about 3% by weight. In an embodiment, lactose is present at about 20% by weight, bacteria or fungi at about 1.47% by weight, FOS, GOS, or other appropriate polysaccharide at about 15% by weight, and buffer is present at about 3% by weight. In an embodiment, lactose is present at about 20% by weight, bacteria or fungi at about 1.47% by weight, FOS, GOS, or other appropriate polysaccharide at about 20% by weight, and buffer is present at about 3% by weight. In an embodiment, lactose is present at about 20% by weight, bacteria or fungi at about 1.47% by weight, FOS, GOS, or other appropriate polysaccharide at about 25% by weight, and buffer is present at about 3% by weight. In an embodiment, lactose is present at about 20% by weight, bacteria or fungi at about 1.47% by weight, FOS, GOS, or other appropriate polysaccharide at about 30% by weight, and buffer is present at about 3% by weight. In an embodiment, lactose is present at about 20% by weight, bacteria or fungi at about 1.47% by weight, FOS, GOS, or other appropriate polysaccharide at about 35% by weight, and buffer is present at about 3% by weight. In an embodiment, lactose is present at about 20% by weight, bacteria or fungi at about 1.47% by weight, FOS, GOS, or other appropriate polysaccharide at about 40% by weight, and buffer is present at about 3% by weight. In an embodiment, lactose is present at about 20% by weight, bacteria or fungi at about 1.47% by weight, FOS, GOS, or other appropriate polysaccharide at about 50% by weight, and buffer is present at about 3% by weight. In an embodiment, lactose is present at about 20% by weight, bacteria or fungi at about 1.47% by weight, FOS, GOS, or other appropriate polysaccharide at about 60% by weight, and buffer is present at about 3% by weight. In an embodiment, lactose is present at about 20% by weight, bacteria or fungi at about 1.47% by weight, FOS, GOS, or other appropriate polysaccharide at about 70% by weight, and buffer is present at about 3% by weight. In an embodiment, lactose is present at about 5% by weight, bacteria or fungi at about 1.47% by weight, FOS, GOS, or other appropriate polysaccharide at about 90% by weight, and buffer is present at about 3% by weight. In an embodiment, lactose is present at about 3% by weight, bacteria or fungi at about 1.47% by weight, FOS, GOS, or other appropriate polysaccharide at about 92% by weight, and buffer is present at about 3% by weight. In an embodiment, lactose is present at about 2% by weight, bacteria or fungi at about 1.47% by weight, FOS, GOS, or other appropriate polysaccharide at about 93% by weight, and buffer is present at about 3% by weight. In an embodiment, lactose is present at about 1% by weight, bacteria or fungi at about 1.47% by weight, FOS, GOS, or other appropriate polysaccharide at about 94% by weight, and buffer is present at about 3% by weight. In an embodiment, lactose is present at about 0.5% by weight, bacteria or fungi at about 1.47% by weight, FOS, GOS, or other appropriate polysaccharide at about 95% by weight, and buffer is present at about 3% by weight. If the bacteria, fungi, FOS, GOS, or other, buffer and lactose do not make up 100% of the composition by weight, the remaining ingredients can be any suitable ingredients intended for consumption by a subject, e.g., human, including, but not limited to, ingredients intended to inhibit clumping and increase pourability, such as silicone dioxide and microcrystalline cellulose, or similar ingredients as are well-additional in the art. Remaining ingredients can also include ingredients to improve handling, preservatives, antioxidants, flavorings and the like.

### I. Additional Ingredients

[0228] Additional ingredients include ingredients to improve handling, preservatives, antioxidants, flavorings and the like. For example, in an embodiment, a prebiotic composition in powdered form can include flavorings such that when mixed in a liquid (e.g., water), the powder can flavor the liquid with various flavors such as grape, strawberry, lime, lemon, chocolate, and the like. In an embodiment, the compositions include microcrystalline cellulose or silicone dioxide. Preservatives can include, for example, benzoic acid, alcohols, for example, ethyl alcohol, and hydroxybenzoates. Antioxidants can include, for example, butylated hydroxyanisole (BHA), butylated hydroxytoluene (BHT), tocopherols (e.g., Vitamin E), and ascorbic acid (Vitamin C).

### Dosage Forms

### A. General

[0229] Compositions described herein include any suitable form, including liquid or powder. Powdered compositions can be as pure powder, or can be in the form of capsules, tablets, or the like. Powder can be packaged in bulk (e.g., in a container containing sufficient prebiotic or other substances for a subject to follow for an entire course of treatment with increasing doses of prebiotic, or a portion of a course of treatment), or as individual packets (e.g., packets containing a single dose of prebiotic plus other components, or packets containing the dose of prebiotic and other components needed for a particular day of a prebiotic treatment regimen). If packaged in bulk, the powder can be in any suitable container, such as a packet, sachet, canister, ampoule, ramekin, or bottle. The container can also include one or more scoops or similar serving devices of a size or sizes appropriate to measure and serve one or more doses of prebiotic and, optionally, other ingredients included in the powder. Liquid compositions contain prebiotic and, optionally, other ingredients, in a suitable liquid, e.g., water or buffer. Liquid compositions can be provided in bulk (e.g., in a container containing sufficient prebiotic or other substances for one subject in need thereof to follow an entire course of treatment with increasing doses of prebiotic, or a portion of a course of treatment), or as individual containers, such as cans, bottles, soft packs, and the like (e.g., containers containing a single dose of prebiotic plus other components in suitable liquid, or containers containing the dose of prebiotic and other components needed for a particular day of a prebiotic treatment regimen). The container can also include one or more measuring cups or similar serving devices of a size or sizes appropriate to measure and serve one or more doses of prebiotic and, optionally, other ingredients included in the liquid.

[0230] In an embodiment, compositions described herein comprise one or more excipients. In an embodiment, the one or more excipients comprise one or more anti-adherents, one or more binders, one or more coatings, one or more disintegrants, one or more fillers, one or more flavors, one or more colors, one or more lubricants, one or more glidants, one or more sorbents, one or more preservatives, one or more sweeteners, or a combination thereof. In an embodiment, the antiadherent is magnesium stearate. In an embodiment, the one or more binders are cellulose, microcrystalline cellulose, hydroxypropyl cellulose, xylitol, sorbitol, maltitol, gelatin, polyvinylpyrrolidone, polyethylene glycol, methyl cellulose, hydroxypropyl methylcellulose, or a combination thereof. In an embodiment, the one or more coatings are a hydroxypropyl methylcellulose film, shellac, corn protein zein, gelatin, methyl acrylate-methacrylic acid copolymers, cellulose acetate succinate, hydroxy propyl methyl cellulose phthalate, hydroxy propyl methyl cellulose acetate succinate, polyvinyl acetate phthalate, methyl methacrylate-methacrylic acid copolymers, sodium alginate, stearic acid, or a combination thereof. In an embodiment, the one or more disintegrants are crosslinked polyvinylpyrrolidone (crospovidone), crosslinked sodium carboxymethyl cellulose (croscarmellose sodium), sodium starch glycolate, or a combination thereof. In an embodiment, the one or more fillers are calcium carbonate, magnesium stearate, dibasic calcium phosphate, cellulose, vegetable oil, vegetable fat, or a combination thereof. In an embodiment, the one or more flavors are mint, cherry, anise, peach, apricot, licorice, raspberry, vanilla, or a combination thereof. In an embodiment, the one or more lubricants are talc, silica, vegetable stearin, magnesium stearate, stearic acid, or a combination thereof. In an embodiment, the one or more glidants are fumed silica, talc, magnesium carbonate, or a combination thereof. In an embodiment, the one or more sorbents are fatty acids, waxes, shellac, plastics, plant fibers, or a combination thereof. In an embodiment, the one or more preservatives are vitamin A, vitamin E, vitamin C, retinyl palmitate, selenium, cysteine, methionine, citric acid, sodium citrate, methyl paraben, propyl paraben, or a combination thereof. In an embodiment, the one or more sweeteners are stevia, sparame, sucralose, neotame, acesulfame potassium, saccharin or a combination thereof.

### B. Oral Dosage Forms and Components

[0231] In one aspect provided herein are methods and compositions formulated for oral delivery to a subject in need thereof. In an embodiment a composition is formulated to deliver a composition comprising a prebiotic to a subject in need thereof. In another embodiment, a pharmaceutical composition is formulated to deliver a composition comprising a prebiotic to a subject in need thereof. In another embodiment a composition is formulated to deliver a composition comprising prebiotic and a probiotic microorganism to a subject in need thereof.

### 1. Forms

[0232] In an embodiment, a composition is administered in solid, semi-solid, micro-emulsion, gel, or liquid form. Examples of such dosage forms include tablet forms disclosed in U.S. Pat. Nos. 3,048,526, 3,108,046, 4,786,505, 4,919,939, and 4,950,484; gel forms disclosed in U.S. Pat. Nos. 4,904,479, 6,482,435, 6,572,871, and 5,013,726; capsule forms disclosed in U.S. Pat. Nos. 4,800,083, 4,532,126, 4,935,243, and 6,258,380; or liquid forms disclosed in U.S. Pat. Nos. 4,625,494, 4,478,822, and 5,610,184; each of which is incorporated herein by reference in its entirety.

[0233] Forms of the compositions that can be used orally include tablets, push-fit capsules made of gelatin, as well as soft, sealed capsules made of gelatin and a plasticizer, such as glycerol or sorbitol. Tablets can be made by compression or molding, optionally with one or more accessory ingredients including freeze-dried plant material serving both as prebiotic and as a filler. Compressed tablets can be prepared by compressing in a suitable machine the active ingredient in a free-flowing form such as a powder or granules, optionally mixed with binders (e.g., povidone, gelatin, hydroxypropylmethyl cellulose), inert diluents, preservative, antioxidant, disintegrant (e.g., sodium starch glycolate, cross-linked povidone, cross-linked sodium carboxymethyl cellulose) or lubricating, surface active or dispersing agents. Molded tablets can be made by molding in a suitable machine a mixture of the powdered compound moistened with an inert liquid diluent. The tablets can optionally be coated or scored and can be formulated so as to provide slow or controlled release of the active ingredient therein. Tablets can optionally be provided with an enteric coating, to provide release in parts of the gut (e.g., colon, lower intestine) other than the stomach. All formulations for oral administration can be in dosages suitable for such administration. The push-fit capsules can contain the active ingredients in admixture with filler such as lactose, binders such as starches, and/or lubricants such as talc or magnesium stearate and, optionally, stabilizers. In soft capsules, the active compounds (prebiotics or probiotics) can be dissolved or suspended in suitable liquids, such as fatty oils, liquid paraffin, or liquid polyethylene glycols. In addition, stabilizers can be added. Dragee cores are provided with suitable coatings. For this purpose, concentrated sugar solutions can be used, which can optionally contain gum arabic, talc, polyvinyl pyrrolidone, carbopol gel, polyethylene glycol, or titanium dioxide, lacquer solutions, and suitable organic solvents or solvent mixtures. Dyestuffs or pigments can be added to the tablets or Dragee coatings for identification or to characterize different combinations of active compound doses.

[0234] Formulations for oral use can also be presented as hard gelatin capsules wherein the active ingredient is mixed with an inert solid diluent, for example, calcium carbonate, calcium phosphate or kaolin, or as soft gelatin capsules wherein the active ingredient is mixed with water soluble carrier such as polyethylene glycol or an oil medium, for example peanut oil, liquid paraffin, or olive oil.

[0235] Oral liquid preparations can be in the form of, for example, aqueous or oily suspensions, solutions, emulsions syrups or elixirs, or can be presented as a dry product for reconstitution with water or other suitable vehicle before use. Such liquid preparations can contain conventional additives, such as suspending agents, for example sorbitol, methyl cellulose, glucose syrup, gelatin, hydroxyethyl cellulose, carboxymethyl cellulose, aluminum stearate gel, fruit dry extracts, plant extracts, or hydrogenated edible fats, emulsifying agents, for example lecithin, sorbitan monooleate, acacia; nonaqueous vehicles (which can include edible oils), for example almond oil, oily esters such as glycerine, propylene glycol, or ethyl alcohol; preservatives, for example methyl or propyl p-hydoxybenzoate or sorbic acid, and, if desired, conventional flavoring or coloring agents.

[0236] In an embodiment, a provided composition includes a softgel formulation. A softgel can contain a gelatin-based shell that surrounds a liquid fill. The shell can be made of gelatin, plasticiser (e.g., glycerin and/or sorbitol), modifier, water, color, antioxidant, or flavor. The shell can be made with starch or carrageenan. The outer layer can be enteric coated. In an embodiment, a softgel formulation can include a water or oil soluble fill solution, or suspension of a composition, for example, a prebiotic composition, covered by a layer of gelatin.

[0237] An enteric coating can control the location of where a prebiotic composition is absorbed in the digestive system. For example, an enteric coating can be designed such that a prebiotic composition does not dissolve in the stomach, but rather, travels to the small intestine, where it dissolves. An enteric coating can be stable at low pH (such as in the stomach) and can dissolve at higher pH (for example, in the small intestine). Material that can be used in enteric coatings includes, for example, alginic acid, cellulose acetate phthalate, plastics, waxes, shellac, and fatty acids (e.g., stearic acid, palmitic acid). Enteric coatings are described, for example, in U.S. Pat. Nos. 5,225,202, 5,733,575, 6,139,875, 6,420,473, 6,455,052, and 6,569,457, all of which are herein incorporated by reference in their entirety. The enteric coating can be an aqueous enteric coating. Examples of polymers that can be used in enteric coatings include, for example, shellac (trade name EmCoat 120 N, Marcoat 125); cellulose acetate phthalate (trade name aquacoat CPD®, Sepifilm™LP, Klucel®Aquacoat®ECD, and Metolose®); polyvinylacetate phthalate (trade name Sureteric®); and methacrylic acid (trade name Eudragit®).

[0238] In an embodiment, an enteric coated prebiotic composition is administered to a subject. In another embodiment, an enteric coated probiotic composition is administered to a subject. In another embodiment, an enteric coated probiotic microorganism and prebiotic composition is administered to a subject. In an embodiment, probiotic microorganisms can be administered to a subject using an enteric coating. The stomach has an acidic environment that can kill probiotics. An enteric coating can protect probiotics as they pass through the stomach and small intestine.

[0239] Enteric coatings can be used to (1) prevent the gastric juice from reacting with or destroying the active substance, (2) prevent dilution of the active substance before it reaches the intestine, (3) ensure that the active substance is not released until after the preparation has passed the stomach, and (4) prevent live bacteria contained in the preparation from being killed because of the low pH-value in the stomach.

[0240] Enteric coatings can also be used for avoiding irritation of or damage to the mucous membrane of the stomach caused by substances contained in the oral preparation, and for counteracting or preventing formation or release of substances having an unpleasant odor or taste in the stomach. Finally, such coatings can be used for preventing nausea or vomiting on intake of oral preparations.

[0241] In an embodiment a prebiotic composition is provided as a tablet, capsule, or caplet with an enteric coating. In an embodiment the enteric coating is designed to hold the tablet, capsule, or caplet together when in the stomach. The enteric coating is designed to hold together in acid conditions of the stomach and break down in non-acid conditions and therefore release the drug in the intestines.

[0242] Softgel delivery systems can also incorporate phospholipids or polymers or natural gums to entrap a composition, for example, a prebiotic composition, in the gelatin layer with an outer coating to give desired delayed/control release effects, such as an enteric coating.

[0243] Formulations of softgel fills can be at pH 2.5-7.5.

[0244] A softgel formulation can be sealed tightly in an automatic manner. A softgel formulation can easily be swallowed, allow for product identification using colors and several shapes, allow uniformity, precision and accuracy between dosages, be safe against adulteration, provide good availability and rapid absorption, and offer protection against contamination, light and oxidation. Furthermore, softgel formulations can avoid unpleasant flavors due to content encapsulation.

[0245] A composition comprising a softgel formulation can be in any of number of different sizes, including, for example, round, oblong, oval, tube, droplet, or suppositories.

[0246] In an embodiment a composition is provided in a dosage form which comprises an effective amount of prebiotic and one or more release controlling excipients as described herein. Suitable modified release dosage vehicles include, but are not limited to, hydrophilic or hydrophobic matrix devices, water-soluble separating layer coatings, enteric coatings, osmotic devices, multi-particulate devices, and combinations thereof. In an embodiment the dosage form is a tablet, caplet, capsule or lollipop. In another embodiment, the dosage form is a liquid, oral suspension, oral solution, or oral syrup. In yet another embodiment, the dosage form is a gel capsule, soft gelatin capsule, or hard gelatin capsule.

[0247] In an embodiment, the dosage form is a gelatin capsule having a size indicated in Table 1.

TABLE 1
Empty Gelatin Capsule Physical
Specifications Allowable For Human Consumption

| Outer | Height or | Actual |
|---|---|---|
| Diameter | Locked | Volume |
| Size (mm) | Length (mm) | (mL) |
| 9.97 | 26.14 | 1.37 |
| 8.53 | 23.30 | 0.95 |
| 7.65 | 21.70 | 0.68 |
| 6.91 | 19.40 | 0.50 |
| 6.35 | 18.00 | 0.37 |
| 5.82 | 15.90 | 0.30 |
| 5.31 | 14.30 | 0.21 |
| 4.91 | 11.10 | 0.13 |

Note:
sizes and volumes are approximate.

[0248] In another embodiment a composition comprising a prebiotic is provided in effervescent dosage forms. The compositions can also comprise non-release controlling excipients.

[0249] In another embodiment, a composition comprising a prebiotic is provided in a dosage form that has at least one component that can facilitate release of the prebiotic. In a further embodiment the dosage form can be capable of giving a discontinuous release of the compound in the form of at least two consecutive pulses separated in time from 0.1 up to 24 hours. The compositions can comprise one or more release controlling and non-release controlling excipients, such as those excipients suitable for a disruptable semi-permeable membrane and as swellable substances.

[0250] In another embodiment the prebiotic mixture is a plant or plant extract, either in solid or liquid form.

[0251] In another embodiment a composition comprising a prebiotic is provided in an enteric coated dosage form. The composition can also comprise non-release controlling excipients.

[0252] In another embodiment a composition comprising a prebiotic is provided in a dosage form for oral administration to a subject in need thereof, which comprises one or more pharmaceutically acceptable excipients or carriers, enclosed in an intermediate reactive layer comprising a gastric juice-resistant polymeric layered material partially neutralized with alkali and having cation exchange capacity and a gastric juice-resistant outer layer.

[0253] In an embodiment a composition comprising a prebiotic is provided in the form of enteric-coated granules, for oral administration. The compositions can further comprise cellulose, disodium hydrogen phosphate, hydroxypropyl cellulose, hypromellose, lactose, mannitol, and sodium lauryl sulfate.

[0254] In another embodiment a composition comprising a prebiotic is provided in the form of enteric-coated pellets, for oral administration. The compositions can further comprise glyceryl monostearate 40-50, hydroxypropyl cellulose, hypromellose, magnesium stearate, methacrylic acid copolymer type C, polysorbate 80, sugar spheres, talc, and triethyl citrate.

[0255] In an embodiment a composition comprising a prebiotic is provided in the form of enteric-coated granules, for oral administration. The compositions can further comprise carnauba wax, crospovidone, diacetylated monoglycerides, ethylcellulose, hydroxypropyl cellulose, hypromellose phthalate, magnesium stearate, mannitol, sodium hydroxide, sodium stearyl fumarate, talc, titanium dioxide, and yellow ferric oxide.

[0256] In another embodiment a composition comprising a prebiotic can further comprise calcium stearate, crospovidone, hydroxypropyl methylcellulose, iron oxide, mannitol, methacrylic acid copolymer, polysorbate 80, povidone, propylene glycol, sodium carbonate, sodium lauryl sulfate, titanium dioxide, and triethyl citrate.

[0257] The compositions provided herein can be in unit-dosage forms or multiple-dosage forms. Unit-dosage forms, as used herein, refer to physically discrete units suitable for administration to human or non-human animal subject in need thereof and packaged individually. Each unit-dose can contain a predetermined quantity of an active ingredient(s) sufficient to produce the desired therapeutic effect, in association with other pharmaceutical carriers or excipients. Examples of unit-dosage forms include, but are not limited to, ampoules, syringes, and individually packaged tablets and capsules. Unit-dosage forms can be administered in fractions or multiples thereof. A multiple-dosage form is a plurality of identical unit-dosage forms packaged in a single container, which can be administered in segregated unit-dosage form. Examples of multiple-dosage forms include, but are not limited to, vials, bottles of tablets or capsules, or bottles of pints or gallons. In another embodiment the multiple dosage forms comprise different pharmaceutically active agents. For example, a multiple dosage form can be provided which comprises a first dosage element comprising a composition comprising a prebiotic and a second dosage element comprising lactose or a probiotic, which can be in a modified release form.

[0258] In this example a pair of dosage elements can make a single unit dosage. In an embodiment a kit is provided comprising multiple unit dosages, wherein each unit comprises a first dosage element comprising a composition comprising a prebiotic and a second dosage element comprising probiotic, lactose or both, which can be in a modified release form. In another embodiment the kit further comprises a set of instructions.

[0259] In an embodiment, compositions can be formulated in various dosage forms for oral administration. The compositions can also be formulated as a modified release dosage form, including immediate-, delayed-, extended-, prolonged-, sustained-, pulsatile-, controlled-, extended, accelerated-, fast-, targeted-, programmed-release, and gastric retention dosage forms. These dosage forms can be prepared according to additional methods and techniques (see, Remington: The Science and Practice of Pharmacy, supra; Modified-Release Drug Delivery Technology, Rathbone et al., Eds., Drugs and the Pharmaceutical Science, Marcel Dekker, Inc.: New York, N.Y., 2002; Vol. 126, which is herein incorporated by reference in its entirety).

[0260] In an embodiment, the compositions are in one or more dosage forms. For example, a composition can be administered in a solid or liquid form. Examples of solid dosage forms include but are not limited to discrete units in capsules or tablets, as a powder or granule, or present in a tablet conventionally formed by compression molding. Such compressed tablets can be prepared by compressing in a suitable machine the three or more agents and a pharmaceutically acceptable carrier. The molded tablets can be optionally coated or scored, having indicia inscribed thereon and can be so formulated as to cause immediate, substantially immediate, slow, controlled or extended release of a composition comprising a prebiotic. Furthermore, dosage forms of the disclosure can comprise acceptable carriers or salts additional in the art, such as those described in the Handbook of Pharmaceutical Excipients, American Pharmaceutical Association (1986), incorporated by reference herein in its entirety.

[0261] In an embodiment, an effective amount of a composition comprising a prebiotic is mixed with a pharmaceutical excipient to form a solid preformulation composition comprising a homogeneous mixture of compounds described herein. When referring to these compositions as “homogeneous,” it is meant that the agents are dispersed evenly throughout the composition so that the composition can be subdivided into unit dosage forms such as tablets, caplets, or capsules. This solid preformulation composition can then be subdivided into unit dosage forms of the type described above comprising from, for example, about 1 g to about 20 mg of a prebiotic composition. A prebiotic composition can be formulated, in the case of caplets, capsules or tablets, to be swallowed whole, for example with water.

[0262] The compositions described herein can be in liquid form. The liquid formulations can comprise, for example, an agent in water-in-solution and/or suspension form; and a vehicle comprising polyethoxylated castor oil, alcohol, and/or a polyoxyethylated sorbitan mono-oleate with or without flavoring. Each dosage form comprises an effective amount of an active agent and can optionally comprise pharmaceutically inert agents, such as conventional excipients, vehicles, fillers, binders, disintegrants, pH adjusting substances, buffer, solvents, solubilizing agents, sweeteners, coloring agents, and any other inactive agents that can be included in pharmaceutical dosage forms for oral administration. Examples of such vehicles and additives can be found in Remington's Pharmaceutical Sciences, 17th edition (1985).

### 2. Manufacturing

[0263] The dosage forms described herein can be manufactured using processes that are well additional to those of skill in the art. For example, for the manufacture of tablets, an effective amount of a prebiotic can be dispersed uniformly in one or more excipients, for example, using high shear granulation, low shear granulation, fluid bed granulation, or by blending for direct compression. Excipients include diluents, binders, disintegrants, dispersants, lubricants, glidants, stabilizers, surfactants and colorants. Diluents, also termed “fillers,” can be used to increase the bulk of a tablet so that a practical size is provided for compression. Non-limiting examples of diluents include lactose, cellulose, microcrystalline cellulose, mannitol, dry starch, hydrolyzed starches, powdered sugar, talc, sodium chloride, silicon dioxide, titanium oxide, dicalcium phosphate dihydrate, calcium sulfate, calcium carbonate, alumina and kaolin. Binders can impart cohesive qualities to a tablet formulation and can be used to help a tablet remain intact after compression. Non-limiting examples of suitable binders include starch (including corn starch and pregelatinized starch), gelatin, sugars (e.g., glucose, dextrose, sucrose, lactose and sorbitol), celluloses, polyethylene glycol, waxes, natural and synthetic gums, e.g., acacia, tragacanth, sodium alginate, and synthetic polymers such as polymethacrylates and polyvinylpyrrolidone. Lubricants can also facilitate tablet manufacture; non-limiting examples thereof include magnesium stearate, calcium stearate, stearic acid, glyceryl behenate, and polyethylene glycol. Disintegrants can facilitate tablet disintegration after administration, and non-limiting examples thereof include starches, alginic acid, crosslinked polymers such as, e.g., crosslinked polyvinylpyrrolidone, croscarmellose sodium, potassium or sodium starch glycolate, clays, celluloses, starches, gums and the like. Non-limiting examples of suitable glidants include silicon dioxide, talc, and the like. Stabilizers can inhibit or retard drug decomposition reactions, including oxidative reactions. Surfactants can also include and can be anionic, cationic, amphoteric or nonionic. If desired, the tablets can also comprise nontoxic auxiliary substances such as pH buffering agents, preservatives, e.g., antioxidants, wetting or emulsifying agents, solubilizing agents, coating agents, flavoring agents, and the like.

[0264] In an embodiment, a softgel formulation is made with a gelatin mass for the outer shell, and a composition including one or more substances, for example prebiotics and/or probiotic microorganisms, for the capsule fill can be prepared. To make the gelatin mass, gelatin powder can be mixed with water and glycerin, heated, and stirred under vacuum. Additives, for example, flavors or colors, can be added to molten gelatin using a turbine mixer and transferred to mobile vessels. The gelatin mass can be kept in a steam-jacketed storage vessel at a constant temperature.

[0265] The encapsulation process can begin when the molten gel is pumped to a machine and two thin ribbons of gel are formed on either side of machine. These ribbons can then pass over a series of rollers and over a set of die that determine the size and shapes of capsules. A fill composition, for example a prebiotic and/or probiotic microorganism fill composition, can be fed to a positive displacement pump, which can dose the fill and inject it between two gelatin ribbons prior to sealing them together through the application of heat and pressure. To remove excess water, the capsules can pass through a conveyer into tumble dryers where a portion of the water can be removed. The capsules can then be placed on, for example, trays, which can be stacked and transferred into drying rooms. In the drying rooms, dry air can be forced over capsules to remove any excess moisture.

### 3. Release Formulations

[0266] Immediate-release formulations of an effective amount of a prebiotic composition can comprise one or more combinations of excipients that allow for a rapid release of a pharmaceutically active agent (such as from 1 minute to 1 hour after administration). In an embodiment an excipient can be microcrystalline cellulose, sodium carboxymethyl cellulose, sodium starch glycolate, corn starch, colloidal silica, Sodium Laurel Sulphate, Magnesium Stearate, Prosolve SMCC (HD90), croscarmellose Sodium, Crospovidone NF, Avicel PH200, and combinations of such excipients.

[0267] “Controlled-release” formulations (also referred to as sustained release (SR), extended-release (ER, XR, or XL), time-release or timed-release, controlled-release (CR), or continuous-release) refer to the release of a prebiotic composition from a dosage form at a particular desired point in time after the dosage form is administered to a subject. Controlled-release formulations can include one or more excipients, including but not limited to microcrystalline cellulose, sodium carboxymethyl cellulose, sodium starch glycolate, corn starch, colloidal silica, Sodium Laurel Sulphate, Magnesium Stearate, Prosolve SMCC (HD90), croscarmellose Sodium, Crospovidone NF, or Avicel PH200. Generally, controlled-release includes sustained but otherwise complete release. A sudden and total release in the large intestine at a desired and appointed time or a release in the intestines such as through the use of an enteric coating are both considered controlled-release. Controlled-release can occur at a predetermined time or in a predetermined place within the digestive tract. It is not meant to include a passive, uncontrolled process as in swallowing a normal tablet. Examples include, but are not limited to, those described in U.S. Pat. Nos. 3,845,770; 3,916,899; 3,536,809; 3,598,123; 4,008,719; 5,674,533; 5,059,595; 5,591,767; 5,120,548; 5,073,543; 5,639,476; 5,354,556; 5,733,556; 5,871,776; 5,902,632; and 5,837,284 each of which is incorporated herein by reference in its entirety.

[0268] In an embodiment a controlled release dosage form begins its release and continues that release over an extended period of time. Release can occur beginning almost immediately or can be sustained. Release can be constant, can increase or decrease over time, can be pulsed, can be continuous or intermittent, and the like. Generally, however, the release of at least one pharmaceutically active agent from a controlled-release dosage form will exceed the amount of time of release of the drug taken as a normal, passive release tablet. Thus, for example, while all of at least one pharmaceutically active agent of an uncoated aspirin tablet should be released within, for example, four hours, a controlled-release dosage form could release a smaller amount of aspirin over a period of six hours, 12 hours, or even longer. Controlled-release in accordance with the compositions and methods described herein generally means that the release occurs for a period of six hours or more, such as 12 hours or more.

[0269] In another embodiment a controlled release dosage refers to the release of an agent, from a composition or dosage form in which the agent is released according to a desired profile over an extended period of time. In an embodiment, controlled-release results in dissolution of an agent within 20-720 minutes after entering the stomach. In another embodiment, controlled-release occurs when there is dissolution of an agent within 20-720 minutes after being swallowed. In another embodiment, controlled-release occurs when there is dissolution of an agent within 20-720 minutes after entering the intestine. In another embodiment, controlled-release results in substantially complete dissolution after at least 1 hour following administration. In another embodiment, controlled-release results in substantially complete dissolution after at least 1 hour following oral administration. For example, controlled-release compositions allow delivery of an agent to a subject in need thereof over an extended period of time according to a predetermined profile. Such release rates can provide therapeutically effective levels of agent for an extended period of time and thereby provide a longer period of pharmacologic or diagnostic response as compared with conventional rapid release dosage forms. Such longer periods of response provide for many inherent benefits that are not achieved with immediate-release dosages. When used in connection with the dissolution profiles discussed herein, the term “controlled-release” refers to wherein all or less than all of the total amount of a dosage form, made according to methods and compositions described herein, delivers an active agent over a period of time greater than 1 hour.

[0270] When present in a controlled-release oral dosage form, the compositions described herein can be administered at a substantially lower daily dosage level than immediate-release forms.

[0271] In an embodiment, the controlled-release layer is capable of releasing about 30 to about 40% of the one or more active agents (e.g., prebiotic and/or probiotic) contained therein in the stomach of a subject in need thereof in about 5 to about 10 minutes following oral administration. In another embodiment, the controlled-release layer is capable of releasing about 90% of the one or more active agents (e.g., prebiotic and/or probiotic) is released in about 40 minutes after oral administration.

[0272] In some embodiments, the controlled-release layer comprises one or more excipients, including but not limited to silicified microcrystalline cellulose (e.g., HD90), croscarmellose sodium (AC-Di-Sol), hydroxyl methyl propyl cellulose, magnesium stearate, or stearic acid. In an embodiment, a controlled release formulation weighs between about 100 mg to 3 g.

[0273] Pharmaceutical carriers or vehicles suitable for administration of the compounds provided herein include all such carriers additional to those skilled in the art to be suitable for the particular mode of administration. In addition, the compositions can one or more components that do not impair the desired action, or with components that supplement the desired action, or have another action.

[0274] In another embodiment, an effective amount of the prebiotic is formulated in an immediate release form. In this embodiment the immediate-release form can be included in an amount that is effective to shorten the time to its maximum concentration in the blood. By way of example, certain immediate-release pharmaceutical preparations are taught in United States Patent Publication US 2005/0147710A1 entitled, “Powder Compaction and Enrobing,” which is incorporated herein in its entirety by reference.

[0275] The dosage forms described herein can also take the form of pharmaceutical particles manufactured by a variety of methods, including but not limited to high-pressure homogenization, wet or dry ball milling, or small particle precipitation (nano spray). Other methods to make a suitable powder formulation are the preparation of a solution of active ingredients and excipients, followed by precipitation, filtration, and pulverization, or followed by removal of the solvent by freeze-drying, followed by pulverization of the powder to the desired particle size.

[0276] In a further aspect the dosage form can be an effervescent dosage form. Effervescent means that the dosage form, when mixed with liquid, including water and saliva, evolves a gas. Some effervescent agents (or effervescent couple) evolve gas by means of a chemical reaction which takes place upon exposure of the effervescent disintegration agent to water or to saliva in the mouth. This reaction can be the result of the reaction of a soluble acid source and an alkali monocarbonate or carbonate source. The reaction of these two general compounds produces carbon dioxide gas upon contact with water or saliva. An effervescent couple (or the individual acid and base separately) can be coated with a solvent protective or enteric coating to prevent premature reaction. Such a couple can also be mixed with previously lyophilized particles (such as a prebiotic). The acid sources can be any which are safe for human consumption and can generally include food acids, acid and hydrite antacids such as, for example: citric, tartaric, amalic, fumeric, adipic, and succinics. Carbonate sources include dry solid carbonate and bicarbonate salt such as, preferably, sodium bicarbonate, sodium carbonate, potassium bicarbonate and potassium carbonate, magnesium carbonate and the like. Reactants which evolve oxygen or other gasses and which are safe for human consumption are also included. In an embodiment citric acid and sodium bicarbonate are used.

[0277] In another aspect the dosage form can be in a candy form (e.g., matrix), such as a lollipop or lozenge. In an embodiment an effective amount of a prebiotic is dispersed within a candy matrix. In an embodiment the candy matrix comprises one or more sugars (such as dextrose or sucrose). In another embodiment the candy matrix is a sugar-free matrix. The choice of a particular candy matrix is subject to wide variation. Conventional sweeteners such as sucrose can be utilized, or sugar alcohols suitable for use with diabetic patients, such as sorbitol or mannitol can be employed. Other sweeteners, such as the aspartames, can also be easily incorporated into a composition in accordance with compositions described herein. The candy base can be very soft and fast dissolving, or can be hard and slower dissolving. Various forms will have advantages in different situations.

[0278] A candy mass composition comprising an effective amount of the prebiotic can be orally administered to a subject in need thereof so that an effective amount of the prebiotic will be released into the subject's mouth as the candy mass dissolves and is swallowed. A subject in need thereof includes a human adult or child.

[0279] In an embodiment a candy mass is prepared that comprises one or more layers which can comprise different amounts or rates of dissolution of the prebiotic. In an embodiment a multilayer candy mass (such as a lollipop) comprises an outer layer with a concentration of the prebiotic differing from that of one or more inner layers. Such a drug delivery system has a variety of applications.

[0280] The choices of matrix and the concentration of the drug in the matrix can be important factors with respect to the rate of drug uptake. A matrix that dissolves quickly can deliver drug into the subject's mouth for absorption more quickly than a matrix that is slow to dissolve. Similarly, a candy matrix that contains the prebiotic in a high concentration can release more of the prebiotic in a given period of time than a candy having a low concentration. In an embodiment a candy matrix such as one disclosed in U.S. Pat. No. 4,671,953 or US Application Publication No. 2004/0213828 (which are herein incorporated by reference in their entirety) is used to deliver the prebiotic.

[0281] The dosage forms described herein can also take the form of pharmaceutical particles manufactured by a variety of methods, including but not limited to high-pressure homogenization, wet or dry ball milling, or small particle precipitation (e.g., nGimat's NanoSpray). Other methods useful to make a suitable powder formulation are the preparation of a solution of active ingredients and excipients, followed by precipitation, filtration, and pulverization, or followed by removal of the solvent by freeze-drying, followed by pulverization of the powder to the desired particle size. In an embodiment the pharmaceutical particles have a final size of 3-1000 μm, such as at most 3, 4, 5, 6, 7, 8, 9, 10, 20, 30, 40, 50, 60, 70, 80, 90, 100, 150, 200, 250, 300, 350, 400, 450, 500, 550, 600, 650, 700, 750, 800, 850, 900, 950, 1000 μm. In another embodiment the pharmaceutical particles have a final size of 10-500 μm. In another embodiment the pharmaceutical particles have a final size of 50-600 μm. In another embodiment the pharmaceutical particles have a final size of 100-800 μm.

[0282] In an embodiment an oral dosage form (such as a powder, tablet, or capsule) is provided comprising a prebiotic composition comprising about 0.7 g of FOS, GOS, or other FOS, GOS, or other appropriate polysaccharide, about 0.2 g of lactose, about 0.01 g of glucose, about 0.01 g of galactose, about 0.1-0.2 g of a binder, about 0.1-0.2 g of a dispersant, about 0.1-0.2 g of a solubilizer, wherein the FOS, GOS, or other FOS, GOS, or other appropriate polysaccharide are composed of about 1-25% disaccharides, about 1-25% trisaccharides, about 1-25% tetrasaccharides, and about 1-25% pentasaccharides. The oral dosage form can be in the form of a powder, capsule, or tablet. Suitable amounts of binders, dispersants, and solubilizers are additional in the art for preparation of oral tablets or capsules.

[0283] In another embodiment an oral dosage form (such as a powder, tablet or capsule) is provided comprising a prebiotic composition comprising about 1-99.9% by weight of FOS, GOS, or other FOS, GOS, or other appropriate polysaccharide about 0.5-20% by weight of lactose, about 0.1-2% by weight of glucose, about 0.1-2% by weight of galactose, about 0.05-2% by weight of a binder, about 0.05-2% by weight of a dispersant, about 0.05-2% by weight of a solubilizer, wherein the FOS, GOS, or other FOS, GOS, or other appropriate polysaccharide are composed of about 1-25% by weight disaccharides, about 1-25% by weight trisaccharides, about 1-25% by weight tetrasaccharides, and about 1-25% by weight pentasaccharides.

[0284] In another embodiment an oral dosage form (such as a powder, tablet, or capsule) is provided comprising a prebiotic composition comprising about 1, 10, 20, 30, 40, 50, 60, 70, 80, 90, 95, 99.5, 100% by weight of FOS, GOS, or other FOS, GOS, or other appropriate polysaccharide about 0, 5, 10, 15, or 20% by weight of lactose, about 0.1, 0.5, 1, or 2% by weight of glucose, about 0.1, 0.5, 1, or 2% by weight of galactose, about 0.05, 0.1, 0.5, 1, or 2% by weight of a binder, about 0.05, 0.1, 0.5, 1, or 2% by weight of a dispersant, about 0.05, 0.1, 0.5, 1, or 2% by weight of a solubilizer, wherein the FOS, GOS, or other FOS, GOS, or other appropriate polysaccharide are composed of about 1, 5, 10, 15, 20, or 25% by weight disaccharides, about 1, 5, 10, 15, 20, or 25% by weight trisaccharides, about 1, 5, 10, 15, 20, or 25% by weight tetrasaccharides, and about 1, 5, 10, 15, 20, or 25% by weight pentasaccharides.

[0285] In another embodiment, an oral dosage form is provided comprising a prebiotic composition, wherein the oral dosage form is a syrup. The syrup can comprise about 1%, 5%, 10%, 15%, 20%, 25%, 30%, 35%, 40%, 45%, 50%, 55%, 60%, 65%, 70%, 75%, 80%, or 85% solid. The syrup can comprise about 15%, 20%, 25%, 30%, 35%, 40%, 45%, or 50% liquid, for example, water. The solid can comprise a prebiotic composition. The solid can be, for example, about 1-96%, 10-96%, 20-96%, 30-96%, 40-96%, 50-96%, 60-96%, 70-96%, 80-96%, or 90-96% prebiotic composition. The solid can be, for example, about 1, 2, 3, 4, 5, 6, 7, 8, 9, 10, 11, 12, 13, 14, 15, 16, 17, 18, 19, 20, 21, 22, 23, 24, 25, 26, 27, 28, 29, 30, 31, 32, 33, 34, 35, 36, 37, 38, 39, 40, 41, 42, 43, 44, 45, 46, 47, 48, 49, 50, 51, 52, 53, 54, 55, 56, 57, 58, 59, 60, 61, 62, 63, 64, 65, 66, 67, 68, 69, 70, 71, 72, 73, 74, 75, 76, 77, 78, 79, 80, 81, 82, 83, 84, 85, 86, 87, 88, 89, 90, 91, 92, 93, 94, 95, or 96% prebiotic composition. In an embodiment a prebiotic composition comprises FOS, GOS, or other FOS, GOS, or other appropriate polysaccharide. In another embodiment a prebiotic composition comprises FOS, GOS, or other FOS, GOS, or other appropriate polysaccharide and another prebiotic. In another embodiment a prebiotic composition comprises FOS, GOS or other and inulin or GOS and FOS.

[0286] In an embodiment, the softgel capsule is about 0.25 mL, 0.5 mL, 1.0 mL, 1.25 mL, 1.5 mL, 1.75 mL, or 2.0 mL. In another embodiment, a softgel capsule comprises about 0.1 g to 2.0 g of prebiotic composition. In another embodiment, a softgel capsule comprises about 0.1, 0.2, 0.3, 0.4, 0.5, 0.6, 0.7, 0.8, 0.9, 1.0, 1.1, 1.2, 1.3, 1.4, 1.5, 1.6, 1.7, 1.8, 1.9, or 2.0 g of a prebiotic composition. In an embodiment the prebiotic composition comprises FOS, GOS, or other FOS, GOS, or other appropriate polysaccharide. In another embodiment the prebiotic composition consists essentially of FOS, GOS, or other FOS, GOS, or other appropriate polysaccharide. In another embodiment, a softgel capsule comprises FOS, GOS, or other FOS, GOS, or other appropriate polysaccharide and inulin or FOS.

[0287] In another embodiment, the prebiotic composition is delivered in a gelatin capsule containing an amount of FOS, GOS, or other FOS, GOS, or other appropriate polysaccharide within the ranges listed in Table 2. In another embodiment, the number of pills taken per day is within the ranges listed in Table 2.

TABLE 2
Exemplary GOS Dosing
Units in Gel Capsules

| Size | GOS/Pill (g) | # pills per day |
|---|---|---|
| 000 | 1-2 | 1-15 |
| 00 | 0.6-1.5 | 1-25 |
| 0 | 0.4-1.1 | 1-38 |
| 1 | 0.3-0.8 | 1-50 |
| 2 | 0.25-0.6 | 1-60 |
| 3 | 0.2-0.5 | 1-75 |
| 4 | 0.14-0.3 | 1-107 |

[0288] In another embodiment, a prebiotic composition is provided that does not contain a preservative. In another embodiment, a prebiotic composition is provided that does not contain an antioxidant. In another embodiment, a prebiotic composition is provided that does not contain a preservative or an antioxidant. In an embodiment a prebiotic composition comprising FOS, GOS, or other FOS, GOS, or other appropriate polysaccharide does not contain a preservative or an antioxidant.

[0289] In another embodiment, a prebiotic composition is formulated as a viscous fluid. In another embodiment, a prebiotic composition is formulated such that its water content is low enough that it does not support microbial growth. In an embodiment, this composition is an intermediate-moisture food, with a water activity between 0.6 and 0.85; in another embodiment this composition is a low-moisture food, with a water activity less than 0.6. Low-moisture foods limit microbial growth significantly and can be produced by one of ordinary skill in the art. For example, these products could be produced similarly to a liquid-centered cough drop. In another embodiment, a prebiotic composition is formulated as a viscous fluid without a preservative in a gel capsule. In another embodiment, a prebiotic composition comprising FOS, GOS, or other FOS, GOS, or other appropriate polysaccharide is a viscous fluid. In another embodiment, a prebiotic composition comprises a high percentage of FOS, GOS, or other FOS, GOS, or other appropriate polysaccharide that does not support microbial growth. In another embodiment, the prebiotic composition comprises FOS, GOS, or other FOS, GOS, or other appropriate polysaccharide and inulin or FOS.

[0290] In another embodiment, an oral dosage form is provided comprising a prebiotic composition, wherein the oral dosage form is a softgel. In an embodiment the softgel comprises a syrup. In an embodiment the syrup comprises a prebiotic composition. In an embodiment the prebiotic composition comprises FOS, GOS, or other FOS, GOS, or other appropriate polysaccharide. In another embodiment the prebiotic composition comprises more than 80% FOS, GOS, or other FOS, GOS, or other appropriate polysaccharide. In another embodiment the prebiotic composition comprises between 80-99.9% FOS, GOS, or other. In another embodiment the prebiotic composition comprises more than 80% FOS, GOS, or other FOS, GOS, or other appropriate polysaccharide. In another embodiment the prebiotic composition comprises about 80, 81, 82, 83, 84, 85, 86, 87, 88, 89, 90, 91, 92, 93, 94, 95, 96, 97, 98, 99, or 99.9% FOS, GOS, or other FOS, GOS, or other appropriate polysaccharide.

[0291] In an embodiment a FOS, GOS, or other FOS, GOS, or other appropriate polysaccharide composition is formulated for delivery in a soft gel capsule. In an embodiment a FOS, GOS, or other FOS, GOS, or other appropriate polysaccharide composition formulated for delivery in a soft gel capsule is a high percentage FOS, GOS, or other FOS, GOS, or other appropriate polysaccharide composition, such as a 90-100% FOS, GOS, or other FOS, GOS, or other appropriate polysaccharide composition (e.g., 90, 91, 92, 93, 94, 95, 96, 97, 98, 99 or 100% FOS, GOS, or other FOS, GOS, or other appropriate polysaccharide composition by weight). In another embodiment a FOS, GOS, or other FOS, GOS, or other appropriate polysaccharide composition formulated for delivery in a soft gel capsule comprises about 95% FOS, GOS, or other FOS, GOS, or other appropriate polysaccharide. In another embodiment a FOS, GOS, or other FOS, GOS, or other appropriate polysaccharide composition formulated for delivery in a soft gel capsule comprises about 96% FOS, GOS, or other FOS, GOS, or other appropriate polysaccharide. In another embodiment, the FOS, GOS, or other FOS, GOS, or other appropriate polysaccharide composition is formulated such that its water content is low enough that it does not support microbial growth. In another embodiment, the FOS, GOS, or other FOS, GOS, or other appropriate polysaccharide composition is formulated as a viscous fluid without a preservative in a gel capsule. In another embodiment, the FOS, GOS, or other FOS, GOS, or other appropriate polysaccharide composition is formulated as a viscous fluid without an antioxidant in a gel capsule. In another embodiment the soft gel capsule comprises about 0.1-2 g of a FOS, GOS, or other FOS, GOS, or other appropriate polysaccharide composition.

[0292] In another embodiment a prebiotic composition can be formulated as described, in U.S. Pat. No. 6,750,331, which is herein incorporated by reference in its entirety. A prebiotic composition can be formulated to comprise an oligosaccharide, a foaming component, a water-insoluble dietary fiber (e.g., cellulose or lignin), or a neutralizing component. In an embodiment a prebiotic composition can be in the form of a chewable tablet.

[0293] In an embodiment a foaming component can be at least one member selected from the group consisting of sodium hydrogencarbonate, sodium carbonate, and calcium carbonate. In an embodiment a neutralizing component can be at least one member selected from the group consisting of citric acid, L-tartaric acid, fumaric acid, L-ascorbic acid, DL-malic acid, acetic acid, lactic acid, and anhydrous citric acid. In an embodiment a water-insoluble dietary fiber can be at least one member selected from the group consisting of crystalline cellulose, wheat bran, oat bran, cone fiber, soy fiber, and beet fiber. The formulation can contain a sucrose fatty acid ester, powder sugar, fruit juice powder, and/or flavoring material.

[0294] Formulations of the provided disclosure can include additive components selected from various additional additives. Such additives include, for example, saccharides (excluding oligosaccharides), sugar alcohols, sweeteners and like excipients, binders, disintegrators, lubricants, thickeners, surfactants, electrolytes, flavorings, coloring agents, pH modifiers, fluidity improvers, and the like. Specific examples of the additives include wheat starch, potato starch, corn starch, dextrin and like starches; sucrose, glucose, fructose, maltose, xylose, lactose and like saccharides (excluding oligosaccharides); sorbitol, mannitol, maltitol, xylitol and like sugar alcohols; calcium phosphate, calcium sulfate and like excipients; starch, saccharides, gelatine, gum arabic, dextrin, methyl cellulose, polyvinylpyrrolidone, polyvinyl alcohol, hydroxypropylcellulose, xanthan gum, pectin, gum tragacanth, casein, alginic acid and like binders and thickeners; leucine, isoleucine, L-valine, sugar esters, hardened oils, stearic acid, magnesium stearate, talc, macrogols and like lubricants; CMC, CMC-Na, CMC-Ca and like disintegrators; polysorbate, lecithin and like surfactants; aspartame, alitame and like dipeptides; silicon dioxide and like fluidity improvers; and stevia, saccharin, and like sweeteners. The amounts of these additives can be properly selected based on their relation to other components and properties of the preparation, production method, etc.

[0295] In an embodiment, a FOS, GOS, or other FOS, GOS, or other appropriate polysaccharide composition is a chewable oral dosage formulation. In an embodiment the chewable formulation can comprises between about 1-99.9% FOS, GOS, or other FOS, GOS, or other appropriate polysaccharide. In an embodiment, a FOS, GOS, or other FOS, GOS, or other appropriate polysaccharide composition comprises about 80% FOS, GOS, or other FOS, GOS, or other appropriate polysaccharide about 5% L-ascorbic acid, about 2% anhydrous citric acid, about 3% sodium hydrogencarbonate, about 3% calcium carbonate, about 2% sucrose fatty acid, about 3% fruit juice powder, and about 2% potassium carbonate.

[0296] In another embodiment, a FOS, GOS, or other FOS, GOS, or other appropriate polysaccharide composition comprises about 85% FOS, GOS, or other FOS, GOS, or other appropriate polysaccharide, about 5% L-ascorbic acid, about 3% sodium hydrogencarbonate, about 2% sodium carbonate, about 2% sucrose fatty acid ester, about 2% fruit juice powder, and about 1% potassium carbonate.

[0297] In another embodiment, a FOS, GOS, or other FOS, GOS, or other appropriate polysaccharide composition comprises about 90% FOS, GOS, or other FOS, GOS, or other appropriate polysaccharide, about 2% L-ascorbic acid, about 1% anhydrous citric acid, about 2% sodium hydrogencarbonate, about 2% sodium carbonate, about 2% sucrose fatty acid ester, and about 1% potassium carbonate.

[0298] In another embodiment, a FOS, GOS, or other FOS, GOS, or other appropriate polysaccharide composition comprises about 95% FOS, GOS, or other FOS, GOS, or other appropriate polysaccharide, about 2% L-ascorbic acid, about 1% sodium hydrogencarbonate, and about 2% fruit juice powder. In another embodiment, a FOS, GOS, or other FOS, GOS, or other appropriate polysaccharide composition comprises about 95% FOS, GOS, or other FOS, GOS, or other appropriate polysaccharide and about 5% of L-ascorbic acid, anhydrous citric acid, sodium hydrogencarbonate, calcium carbonate, sucrose fatty acid, fruit juice powder, or potassium carbonate.

[0299] In another embodiment, a FOS, GOS, or other FOS, GOS, or other appropriate polysaccharide composition comprises about 95% FOS, GOS, or other FOS, GOS, or other appropriate polysaccharide and about 5% of L-ascorbic acid, anhydrous citric acid, sodium hydrogencarbonate, calcium carbonate, sucrose fatty acid, fruit juice powder, and potassium carbonate.

### Medical Foods

[0300] An alternate embodiment of the present disclosure is a formulation as a medical food.

[0301] The consuming public has come to understand that foods possess more than basic nutrition (protein, carbohydrate, fat, etc). For example, 95% of consumers agree that “certain foods have health benefits that go beyond basic nutrition and may reduce the risk of disease or other health concerns.” More than 50% of consumers believe that foods can replace the use of drugs. Replacing the use of drugs may have the benefit of reducing the incidence of adverse side effects suffered by patients following a pharmaceutical drug treatment regimen. In fact, medical foods are assumed to be generally safe, as people have historically consumed these foods safely in non-medical contexts.

[0302] The compositions of the disclosure may be administered under the supervision of a medical specialist, or may be self-administered. Medical foods could take the form of nutritional shakes or other liquids or meal replacements or delivery by nasogastric enteral feeding tube. Medical foods of the present disclosure could also take the form of a powder capable of being consumed upon addition to suitable food or liquid.

[0303] A medical food formulation of the present disclosure could confer benefits of a synthetic composition of probiotics, microbes isolated from nutritionally beneficial plants, prebiotics, and/or other nutritionally beneficial inclusions. The medical food formulation could be consumed to provide a metabolic function different than a foodstuff rather than to obtain nutrition alone. For example, medical foods of the disclosure may also include at least one vitamin or vitamin precursor. Preferred vitamins possess antioxidant properties and include vitamins A, C, and E, and/or their biochemical precursors. Another embodiment of the medical foods of the disclosure also includes at least one trace element, preferably selected from the group consisting of zinc, manganese and selenium. Medical foods of the disclosure also may include at least one additional antioxidant selected from the group consisting of carotenoids, N-acetylcysteine and L-glutamine. It is additional to those of skill in the art how to construct medical foods containing these elements.

[0304] Medical foods of the present disclosure would include effective doses of microbes deemed useful for the indication and effective doses of any vitamin, prebiotic, or other beneficial additive not consumed to obtain nutrition but to add a therapeutic benefit mediated by the production of SCFA or other immuno-stimulant molecules when passing through the GI tract.

[0305] Typically, the dietary supplements and medical foods of the present disclosure are consumed at least once daily. In certain embodiments, the dietary supplements and medical foods of the disclosure are administered two times per day, optionally once in the morning and once in the afternoon. In certain embodiments, a treatment regime for the dietary supplements or medical foods will continue for four to eight weeks. Depending on such factors as the medical condition being treated and the response of the patient, the treatment regime may be extended. In certain embodiments, a medical food of the present disclosure will be consumed in two servings per day as either a meal replacement or as a snack between meals.

[0306] A subject perceived to be at risk from an immune system disorder, metabolic syndrome, obesity, T2D, digestive distress, bone loss, low bone density, chronic inflammation or already suffering from these or associated disorders, can potentially benefit from ingesting the compositions of the disclosure. In certain embodiments, the compositions of the disclosure can effectively ameliorate symptoms and conditions associated with an immune system disorder, T2D, metabolic syndrome, obesity, digestive distress, bone loss, low bone density, or chronic inflammation with natural compounds, which do not show any severe side effects. Furthermore, the present methods are expected to be well-tolerated, for example without causing any discomfort or nausea, and simple to apply.

### Co-Administration

[0307] One or more of the microbial entities described herein and/or additional compounds can be co-administered together. The term “co-administration” refers to two or more microbial entities and/or compounds administered in such a way that they exert their pharmacological effects for the same period of time. Such co-administration may be accomplished by simultaneous, contemporaneous or sequential administration of the two or more microbial entities and/or compounds. Compounds can include a therapeutic agent or a drug. A therapeutic agent or drug can be any agent used in the treatment of a human disease. For example in type 2 diabetes or metabolic syndrome, the compound can be an anti-diabetic medication including, but not limited to, metformin, Acarbose, Miglitol, Voglibose, Sitagliptin, Saxagliptin, Liraglutide, Semaglutide, Tirzepatide, Pioglitazone, dipeptidyl peptidase-4 (DPP4)-inhibitors, glucagon-like peptide-1 (GLP-1) receptor analogs, alpha glucosidase inhibitors, thiazolidinedione, and sodium/glucose cotransporter 2 (SGLT2) inhibitors. In another example, the compound can be an anti-osteoporosis medication including, but not limited to, bisphosphonates (e.g., alendronate, risedronate, ibandronate, zolendronate), biologics (e.g., denosumab, romosozumab), selective estrogen receptor mediators (e.g., Raloxifene), or anabolic agents (e.g., teriparatide, abaloparatide).

[0308] In some embodiments, the probiotic compositions described herein are co-administered with an effective amount of an additional therapeutic agent or along with an effective drug regimen to improve the efficacy of said therapeutic agent or drug regimen.

[0309] In some embodiments, the probiotic compositions described herein are co-administered with an effective amount of an additional therapeutic agent or along with an effective drug regimen to reduce the side effects of said therapeutic agent or drug regimen.

[0310] Co-administration encompasses methods given or given in any combination of simultaneously, sequentially, intermittently and/or continuously. In one aspect, the present disclosure provides a method wherein of the two or more microbial entities and/or compounds is administered intermittently. In one aspect, the present disclosure provides a subject with the two or more microbial entities and/or compounds at least ten (10) minutes, fifteen (15) minutes, twenty (20) minutes between administrations. Minutes, thirty (30) minutes, forty (40) minutes, sixty (60) minutes, two (2) hours, three (3) hours, four (4) hours, six (6) hours, eight (8) hours, Ten (10) hours, twelve (12) hours, fourteen (14) hours, eighteen (18) hours, twenty-four (24) hours, thirty-six (36) hours, forty-eight (48) hours, three (3) days, Four (4), five (5), six (6), seven (7), eight (8), nine (9), ten (10), ten (11), twelve (12) days, thirteen (13) days, fourteen (14) days, three (3) weeks, or four (4) weeks of delayed administration. In such embodiments, delayed administration is continued wherein the two or more microbial entities and/or compounds is continued for a given period of time from about ten (10) minutes to about three hundred and sixty-five (365) days. Followed by a pattern that is not administered for a given period of time from about ten (10) minutes to about thirty (30) days. In one aspect, the present disclosure provides a method wherein of the two or more microbial entities and/or compounds is administered intermittently while the remainder is continuously given. The two or more microbial entities and/or compounds can be administered at different intervals.

[0311] In one aspect, the present disclosure provides a method of the two or more microbial entities and/or compounds is administered sequentially. In one aspect, the present disclosure provides a method of simultaneously administering of the two or more microbial entities and/or compounds.

[0312] In some embodiments, the present disclosure provides a method of administering the two or more microbial entities and/or compounds in one formulation. In some embodiments, the present disclosure provides a method of administering a combination in two (2) compositions, such as wherein the two or more microbial entities are separate from the formulation of a compound (e.g., a drug or therapeutic agent), or wherein the two or more microbial entities are in separate formulations (e.g., a probiotic microorganism, such as a GRAS probiotic microorganism, is separate from the one or more microbial entities presented in Tables 4-8).

[0313] The two or more microbial entities and/or compounds can be co-administered via different routes, e.g., a probiotic composition can be administered orally and a drug or therapeutic agent can be administered intravenously, subcutaneously, or any other route appropriate for administration of the drug or therapeutic agent, as will be appreciated by one skilled in the art.

### Methods for Improving Immune Health

[0314] In certain aspects, described herein are methods of improving immune health in a subject, the method comprising administering to the subject an effective amount of the pharmaceutical composition, medical food, dietary supplement or solid food stuff described herein. In certain embodiments, the method modulates the level and/or activity of an inflammatory cytokine in a subject. In certain embodiments, the modulating the level and or activity of an inflammatory cytokine, comprises reducing the level and/or activity of at least one inflammatory cytokine selected from the group consisting of IFNγ, IL-12, TNF-α, IL-17, IL-6, IL-1β, IL-10, and combinations thereof. In certain embodiments, the level and/or activity of the at least one inflammatory cytokine is reduced in the serum or select tissue of subject after administration of the pharmaceutical composition, medical food, dietary supplement or solid food stuff compared to a level and/or activity of the at least one inflammatory cytokine prior to administration of the pharmaceutical composition, medical food, dietary supplement or solid food stuff. In certain embodiments, the level and/or activity of the at least one inflammatory cytokine in the serum or select tissue of a human subject after the administration of the effective amount of the pharmaceutical composition, medical food, dietary supplement or solid food stuff. In certain embodiments, the method causes an anti-inflammatory effect in the subject. In certain embodiments, the anti-inflammatory effect is caused by the production of at least one anti-inflammatory metabolite by either the first microbial entity, the second microbial entity or both the first and the second microbial entities. In certain embodiments, the method prevents, reduces the severity of, and/or enables the dietary management of an immune system disorder. In certain embodiments, the immune system disorder is selected from the group consisting of allergic rhinitis, allergic conjunctivitis, allergic bronchial asthma, atopic eczema, ulcerative colitis, Crohn's disease, celiac disease, multiple sclerosis, anaphylaxis, insect sting, drug allergy, food allergy, asthma, eczema, a disorder or condition associated with a pathological Th17 activity, and combinations thereof.

[0315] In certain embodiments, the first microbial entity and the second microbial entity synergize to produce an anti-inflammatory effect in a mammalian host. In certain embodiments, the anti-inflammatory effect in a mammalian host is caused by the production at least one anti-inflammatory metabolite by either the first microbial entity, the second microbial entity or both the first and the second microbial entities. In certain embodiments, administering an effective dose of the pharmaceutical composition to a human subject reduces the level and/or activity of at least one inflammatory cytokine selected from the group consisting of IFNγ, IL-12, TNF-α, IL-17, IL-6, IL-1β, IL-10, and combinations thereof relative to a level and/or activity of the inflammatory cytokine in the serum of the human subject; or a tissue of the subject, prior to administering the pharmaceutical composition to the subject.

### EXAMPLES

[0316] Below are examples of specific embodiments for carrying out the present disclosure. The examples are offered for illustrative purposes only and are not intended to limit the scope of the present disclosure in any way. Efforts have been made to ensure accuracy with respect to numbers used (e.g., amounts, temperatures, etc.), but some experimental error and deviation should, of course, be allowed for.

[0317] The practice of the present disclosure will employ, unless otherwise indicated, conventional methods of protein chemistry, biochemistry, recombinant DNA techniques and pharmacology, within the skill of the art. Such techniques are explained fully in the literature. See, e.g., T. E. Creighton, Proteins: Structures and Molecular Properties (W.H. Freeman and Company, 1993); A. L. Lehninger, Biochemistry (Worth Publishers, Inc., current addition); Sambrook, et al., Molecular Cloning: A Laboratory Manual (2nd Edition, 1989); Methods In Enzymology (S. Colowick and N. Kaplan eds., Academic Press, Inc.); Remington's Pharmaceutical Sciences, 18th Edition (Easton, Pennsylvania: Mack Publishing Company, 1990); Carey and Sundberg Advanced Organic Chemistry 3^{rd} Ed. (Plenum Press) Vols A and B (1992).

### Example 1: Microbe Isolation, Bacteria and Fungi

[0318] Plant-based and fermented foods are rich sources of diverse microbes. A microbial library was developed that contains microbes from these sources as they represent an untapped potential source of novel beneficial microbes. Vegetables typically eaten raw and fermented foods were selected for isolation of microbes of interest. The materials were sourced at the point of distribution in supermarkets selling both conventional and organic farmed vegetables, either washed and ready to eat or without washing. The samples were divided into 50 g portions, thoroughly rinsed with tap water and blended for 30 seconds on high speed. Large particulate matter in the mixtures was then removed with the use of a coarse and then a fine sieve followed by filtration through a 40 μm sieve. The sieved samples from each food source were stored with a cryoprotectant, for example 10% DMSO.

[0319] For DNA extraction, the cell suspension containing the plant microbiota, chloroplasts and plant cell debris was centrifuged at slow speed for removing plant material and the resulting supernatant was centrifuged at high speed to pellet microbial cells. The pellet was resuspended in a buffer containing a proprietary plant cell lysis buffer consisting of chelating agents such as EDTA or Versetene EDTA-based chelating agents to remove divalent ions and a suitable non-ionic detergent such as Tween-20, Tween 80, Triton X, and then washed with PBS. DNA was extracted. DNA quality and concentration were measured. DNA libraries were built, and DNA sequencing was performed. Raw paired-end reads were processed for quality control. Taxonomic annotation at the species level of the microbial community for each sample was metagenome using k-mer analysis with kraken2. Plant samples were also inoculated into media that would facilitate the growth of certain types of organisms to generate Solarea Bio enrichments (SBEs). As examples, cultivation with plant filtrates or acetate enriched broth can enrich for microbes capable of growth on plant substrates or low pH-tolerant microbes.

[0320] The sieved samples were also diluted and plated onto media that is non-selective, such as tryptic soy agar, or plated on media that is selective for a given microbial type. For example, fungi can be isolated from a sample by plating on a medium such as potato dextrose agar with added chlorotetracycline to prevent bacterial growth. Likewise, bacteria can be isolated away from yeast by added selective agents such as cycloheximide to the medium. Single colonies were then selected and purified by sequential streak isolations or single cell sorting by FACS. These isolates were then assigned a preliminary identification by 16S rDNA or ITS sequencing for bacteria or fungi respectively, before in depth sequencing analysis.

### Example 2: Genome Sequencing

[0321] The highest throughput method of determining microbial functional potential begins with bioinformatic analyses. Through sequencing of isolated microbial candidates, it is possible to identify microbes with potentially beneficial phenotypes.

[0322] Whole-genome sequencing: whole-genome sequencing was performed. Microbes grown in pure culture were centrifuged at 4000×rpm for 10 min to remove supernatant. Genomic DNA was isolated from microbial pellets via column-based commercial genomic isolation kits. DNA libraries were built. DNA sequencing was performed using either Illumina or Oxford Nanopore sequencing platforms. Raw reads were processed for quality control, and quality-filtered reads were de novo assembled. Nanopore raw sequencing data was converted into a nucleic acid sequence through the “guppy_basecaller” command line software. Library barcodes were removed, and individual reads were separated by source through the “porechop” demultiplexing tool. Following demultiplexing, assembly of contigs was preformed through the “flye” assembly tool.

### Example 3: Annotation of Genomes

[0323] Once a microbial genome has been sequenced it is possible to determine its capacity to produce potentially therapeutic metabolites and compounds. Genome annotation was performed to determine the microbe's taxonomy and gene content. To determine the genes, present within each individual genome, the command line software tool, prokka, was used. The assembled contig information derived from genomic sequencing is input into prokka, which initially identifies the locations of all protein coding sequences, after which coding sequences are annotated as specific genes based on a database of all non-fragment Uniprot entries that have transcript evidence (Apeweiler et al., 2004).

[0324] To identify specific genes-of-interest that may not be annotated due to low homology, the BLAST+ command line application was used. A genes-of-interest database was constructed, which contains orthologous genes-of-interest from different species. A non-comprehensive list of genes within this database is included in SEQ ID NO: 1557-1727. Genes-of-interest have included the gene pathways involved in short chain fatty acid (propionate and butyrate) biogenesis, indole (indole-3-acetic acid and indole propionic acid), Gamma-aminobutyric acid (GABA), surfactants (surfactin, nisin, fengycin, and iturin), dopamine, secondary bile acids, exopolysaccharide proteins (EPS), and omega 3 fatty acids biosynthesis.

### Example 4. Gut Simulation Experiments

[0325] An in vitro system that mimics various sections of the gastrointestinal tract was used to identify probiotic strains of interest. Isolates of interest were incubated in the presence of conditions that mimic particular stresses in the gastro-intestinal tract (such as low pH or bile salts), heat shock, or metformin. After incubation, surviving populations were recovered. Representative isolates identified by this methodology are shown in Table 3 (strains DPT-DP102, corresponding to 16S/ITS SEQ ID NOs: 1-102, respectively). The design layout for this system is depicted in FIG. 1.

TABLE 3
Strains resistant to gut stress, listed with heat shock tolerance,
acid shock tolerance, and isolation temperature.

| | | | | Acid | | |
|---|---|---|---|---|---|---|
| Strain | Strain | | | shock | | |
| Number | No. | Heat | Isolation | (pH 3) | | |
| (SBI) | (DP) | shock | temp | 2 hr | Genus | species |
| SBI189 | DP1 | No | 25 | No | Pseudomonas | fluorescens |
| SBI366 | DP10 | Yes | 25 | No | Bacillus | velezensis |
| SBI3108 | DP100 | No | 30 | No | Lactobacillus | plantarum |
| SBI3220 | DP101 | No | 30 | No | Pediococcus | pentosaceus |
| SBI3298 | DP102 | No | 30 | No | Pichia | kudriavzevii |
| SBI3299 | DP11 | No | 25 | No | Pseudomonas | putida |
| SBI3300 | DP12 | No | 25 | Yes | Microbacterium | sp. |
| SBI3301 | DP13 | No | 25 | Yes | Bacillus | mycoides |
| SBI3302 | DP14 | No | 25 | Yes | Arthrobacter | luteolus |
| SBI3303 | DP15 | No | 25 | No | Curtobacterium | sp. |
| SBI3304 | DP16 | No | 25 | No | Cryptococcus | laurentii |
| SBI3306 | DP17 | No | 25 | No | Rahnella | aquatilis |
| SBI3307 | DP18 | No | 25 | No | Pseudomonas | sp. |
| SBI4260 | DP19 | No | 25 | No | Curtobacterium | pusillum |
| SBI4261 | DP2 | No | 37 | No | Hanseniaspora | occidentalis |
| SBI4263 | DP20 | No | 25 | No | Stenotrophomonas | rhizophila |
| SBI3353 | DP21 | No | 25 | No | Candida | santamariae |
| SBI3316 | DP22 | No | 25 | No | Rahnella | sp. |
| SBI3317 | DP23 | No | 25 | No | Erwinia | billingiae |
| SBI3327 | DP24 | No | 25 | No | Filobasidium | globisporum |
| SBI3329 | DP25 | No | 25 | No | Penicillium | solitum |
| SBI3330 | DP26 | No | 25 | No | Methylobacterium | sp. |
| SBI3332 | DP27 | No | 25 | No | Sphingomonas | sp. |
| SBI3355 | DP28 | No | 25 | Yes | Aureobasidium | pullulans |
| SBI3359 | DP29 | No | 25 | Yes | Pseudoclavibacter | helvolus |
| SBI534 | DP3 | No | 25 | No | Leuconostoc | mesenteroides |
| SBI3405 | DP30 | No | 25 | Yes | Microbacterium | testaceum |
| SBI3406 | DP31 | No | 25 | Yes | Sporisorium | reilianum |
| SBI3438 | DP32 | No | 25 | No | Hafnia | paralvei |
| SBI3440 | DP33 | No | 25 | No | Erwinia | persicinus |
| SBI3473 | DP34 | No | 25 | Yes | Plantibacter | flavus |
| SBI3477 | DP35 | No | 25 | Yes | Pantoea | ananatis |
| SBI3478 | DP36 | No | 25 | Yes | Pantoea | vagans |
| SBI3497 | DP37 | No | 25 | No | Pseudomonas | rhodesiae |
| SBI3498 | DP38 | No | 25 | No | Rhodococcus | sp. |
| SBI3499 | DP39 | No | 25 | No | Agrobacterium | tumefaciens |
| SBI289 | DP4 | No | 25 | No | Aureobasidium | pullulans |
| SBI3528 | DP40 | No | 37 | No | Pantoea | sp. |
| SBI3529 | DP41 | Yes | 37 | No | Corynebacterium | mucifaciens |
| SBI3530 | DP42 | No | 37 | No | Pseudomonas | lundensis |
| SBI3534 | DP43 | No | 25 | No | Janthinobacterium | sp. |
| SBI3535 | DP44 | No | 25 | No | Herbaspirillum | sp. |
| SBI3540 | DP45 | No | 25 | No | Sanguibacter | keddieii |
| SBI3553 | DP46 | No | 25 | Yes | Pantoea | agglomerans |
| SBI3555 | DP47 | No | 25 | Yes | Cronobacter | dublinensis |
| SBI3606 | DP48 | Yes | 25 | No | Bacillus | paralicheniformis |
| SBI3609 | DP49 | Yes | 25 | No | Bacillus | gibsonii |
| SBI319 | DP5 | No | 37 | No | Debaromyces | hansenii |
| SBI3639 | DP50 | No | 25 | No | Enterobacter | sp. |
| SBI3640 | DP51 | No | 25 | No | Klebsiella | aerogenes |
| SBI3641 | DP52 | No | 25 | No | Arthrobacter | sp. |
| SBI3643 | DP53 | No | 25 | No | Pseudomonas | fragi |
| SBI3659 | DP54 | No | 25 | No | Methylobacterium | adhaesivum |
| SBI3670 | DP55 | Yes | 25 | No | Bacillus | megaterium |
| SBI3672 | DP56 | Yes | 25 | No | Paenibacillus | lautus |
| SBI3758 | DP57 | Yes | 25 | No | Bacillus | mycoides |
| SBI3770 | DP58 | No | 25 | No | Janthinobacterium | svalbardensis |
| SBI3772 | DP59 | No | 25 | No | Kosakonia | cowanii |
| SBI548 | DP6 | Yes | 25 | No | Bacillus | cereus |
| SBI3819 | DP60 | Yes | 25 | No | Bacillus | simplex |
| SBI4018 | DP61 | No | 25 | No | Lelliottia | sp. |
| SBI4020 | DP62 | No | 25 | No | Erwinia | sp. |
| SBI4059 | DP63 | No | 25 | Yes | Pseudomonas | azotoformans |
| SBI108 | DP64 | No | 25 | No | Hanseniaspora | uvarum |
| SBI182 | DP65 | No | 25 | No | Bacillus | sp. |
| SBI272 | DP66 | No | 25 | No | Hanseniaspora | occidentalis |
| SBI545 | DP67 | Yes | 25 | No | Bacillus | sp. |
| SBI550 | DP68 | Yes | 25 | No | Bacillus | atrophaeus |
| SBI552 | DP69 | Yes | 25 | No | Bacillus | sp. |
| SBI817 | DP7 | No | 25 | No | Pichia | fermentans |
| SBI564 | DP70 | No | 25 | No | Bacillus | tequilensis |
| SBI1194 | DP71 | No | 25 | No | Rhodosporidium | babjevae |
| SBI1838 | DP72 | Yes | 25 | No | Bacillus | sp. |
| SBI2802 | DP73 | Yes | 37 | No | Bacillus | amyloliquefaciens |
| SBI3025 | DP74 | Yes | 25 | No | Bacillus | coagulans |
| SBI3106 | DP75 | No | 37 | No | Bacillus | valezensis |
| SBI3482 | DP76 | No | 25 | No | Ochrobactrum | sp. |
| SBI3608 | DP77 | Yes | 25 | No | Bacillus | megaterium |
| SBI3625 | DP78 | No | 25 | No | Erwinia | rhapontici |
| SBI3643 | DP79 | No | 25 | No | Pseudomonas | fragi |
| SBI1485 | DP8 | No | 25 | No | Hanseniaspora | opuntiae |
| SBI3659 | DP80 | No | 25 | No | Methylobacterium | adhaesivum |
| SBI3805 | DP81 | Yes | 37 | No | Bacillus | sp. |
| SBI3882 | DP82 | Yes | 37 | No | Bacillus | velezensis |
| SBI3886 | DP83 | Yes | 37 | No | Bacillus | amyloliquefaciens |
| SBI3916 | DP84 | No | 25 | No | Microbacterium | sp. |
| SBI4245 | DP85 | No | 30 | No | Enterococcus | faecium |
| SBI4246 | DP86 | No | 30 | No | Bacillus | velezensis |
| SBI4247 | DP87 | No | 30 | No | Lactobacillus | plantarum |
| SBI4248 | DP88 | No | 30 | No | Bacillus | velezensis |
| SBI4249 | DP89 | No | 30 | No | Bacillus | subtilis |
| SBI2335 | DP9 | No | 25 | No | Pediococcus | pentosaceus |
| SBI4250 | DP90 | No | 30 | No | Lactobacillus | plantarum |
| SBI4251 | DP91 | No | 30 | No | Bacillus | sp. |
| SBI4252 | DP92 | No | 30 | No | Bacillus | tequilensis |
| SBI4255 | DP93 | No | 30 | No | Leuconostoc | mesenteroides |
| SBI4254 | DP94 | No | 30 | No | Lactobacillus | brevis |
| SBI4253 | DP95 | No | 30 | No | Lactobacillus | paracasei |
| SBI4256 | DP96 | No | 30 | No | Lactobacillus | casei |
| SBI4257 | DP97 | No | 30 | No | Lactococcus | garvieae |
| SBI4258 | DP98 | No | 30 | No | Lactococcus | garvieae |
| SBI4259 | DP99 | No | 30 | No | Weissella | cibaria |

### Example 5: Identification of Enzymes Involved in Production of Immunomodulatory Compounds

[0326] Microbes including bacteria and fungi are known to produce compounds with immunomodulatory and anti-inflammatory properties including but not limited to short chain fatty acids (SCFA), indoles and indole derivatives, anti-microbial compounds, neurotransmitters such as GABA, serotonin, and dopamine, extracellular polymeric substances (EPS), biosurfactants, secondary bile acids, and polyunsaturated fatty acids. To screen for these compounds in silico, enzyme commission (EC) numbers and amino acid reference sequences were identified for each potential biosynthetic pathway for the production of compounds of interest (SEQ ID NO: 1557-1727). The genes-of-interest database was blasted against the amino acid sequences from the genomes with a 60% identity and 60% query aligned region threshold to identify potential homologs (SEQ ID NO: 1769-1556).

### Example 6: Measurement of Microbially Produced Compounds

[0327] The levels of microbially produced metabolites were examined in vitro. Individual microbes were grown in pure culture, after which the microbially conditioned supernatants were examined for metabolites including short chain fatty acids and indole derivatives.

[0328] Indole derivatives: In the intestine, tryptophan (Trp) can be metabolized into indole derivatives by the intestinal microbiota that can act as ligands for the aryl hydrocarbon receptor (AhR) in host cells to impact the immune response (Caffaratti et al., 2021, Postler et al., 2017). Indole derivatives including but not limited to indole, indole acetic acid (IAA), and indole propionic acid (IPA) can modulate the production of IL-22, an important mediator of intestinal homeostasis, as well as suppress the activation of NF-κB while simultaneously increasing the production of or anti-inflammatory cytokines to reduce inflammation in the host (Gao et al., 2018). For example, in vitro studies have demonstrated the ability of indole to reduce TNF-α mediated activation of NF-κB, expression of the proinflammatory cytokine IL-8, and induce the production of the anti-inflammatory cytokine IL-10 in HCT-8 cells (Bansal et al., 2010). Thus, screening for microbes that produce indole metabolites will lead to the discovery of microbes with probiotic potential. To detect the presence of indole derivatives from microbes, conditioned supernatant was examined by Salkowski assay, a standard biochemical test that is commonly used to identify the presence of indole-containing compounds with a functional range of detection between 1-100 μM (Sethi et al., 2021). Results for indole derivative production from a selection of examined organisms and consortia can be found in Table 6.

[0329] Short chain fatty acid quantification: Short chain fatty acids (SCFA), including acetate, propionate, and butyrate, are produced as a result of anaerobic bacterial fermentation of dietary fibers within the intestine and especially within the colon (Macfarlane et al., 2003). SCFAs have different modes of action on both local and systemic regulation of the immune system. SCFAs regulate and improve the intestinal barrier function by upregulation of the expression of tight junctions (Caffaratti et al., 2021). SCFAs play an important role in T-cell functioning via regulation of G-protein-coupled receptors (GPCRs) and inhibition of histone deacetylase (HDAC) (Caffaratti et al., 2021). One of the most well described and potent anti-inflammatory properties of SCFAs is their capacity to promote regulatory T cells (Tregs) which suppress the activity of effector T cells (Postler et al., 2017). SCFA also inhibit the production of proinflammatory cytokines, including TNF-α, IL-6, and IL-1β, from intestinal macrophages to reduce local and systemic inflammation (Caffaratti et al., 2021). To measure short chain fatty acid production, microbes were grown in pure culture under aerobic or anaerobic conditions. The microbially conditioned supernatant was then examined by gas chromatography (GC) for the presence of acetate, butyrate, and propionate, as previously described (Scortichini et al., 2020). Results for short chain fatty acid production from a selection of examined organisms and consortia can be found in Tables 7-8.

### Example 7: DMA Formulation and In Vitro Testing of DMA Functionality

[0330] Microbes in nature generally interact with multiple other groups and form consortia that work in synergy, exchanging metabolic products and substrates resulting in thermodynamically favorable reactions as compared to the individual metabolism. For example, in the human colon, the process for plant fiber depolymerization, digestion and fermentation into butyrate is achieved by multiple metabolic groups working in concert. This type of synergy is reproduced in the DMA concept where strains are selected to be combined based on their ability to synergize to produce anti-inflammatory compounds when exposed to substrates such as plant fibers, tryptophan, or sucrose.

[0331] To experimentally describe the process of DMA validation the following method is applied to find candidates applicable for specific products:

[0332] Define a suitable habitat where microbes are with desirable attributes are abundant based on ecological hypotheses. For example, fresh vegetables are known to have anti-inflammatory effects when consumed in a whole-food plant-based diet, and therefore, it is likely they harbor microbes that can colonize the human gut.

[0333] Apply a selection filter to isolate and characterize only those microbes capable of a relevant function. For example, SCFA production or indole production. In addition, strains need to be compatible with relevant therapeutic drugs.

[0334] Selected strains are then cultivated in vitro and their genomes sequenced at 10× coverage to assemble, annotate and use in predictive computational models to predict microbial functions in silico and then validate experimentally using the phenotypic methods described in Example 6.

[0335] Microbes with complementary or predicted synergistic functions are then combined. As a non-limiting example, DMA could be assembled from microbes with complementary functions such as Paraclostridium benzoelyticum that produces abundant SCFAs but does not produce any other anti-inflammatory targets and Exiguobacterium sp., which produces IAA, inhibits pathogens, and produces EPS.

[0336] Predicted synergistic combinations are then tested in the laboratory to validate functional synergies. Single strains are grown to produce a biomass and the spent growth media is removed after reaching late log or stationary phase. The washed cells are then combined in Defined Microbial Assemblages with about 2-10 different strains per DMA and incubated using a culture media with prebiotic substances and precursors including but not limited to tryptophan, mono or oligosaccharides, or fruit or vegetable powders that promote anti-inflammatory product formation.

[0337] DMAs are analyzed for their ability to produce anti-inflammatory compounds in a synergistic manner (i.e., greater production of anti-inflammatory compounds by the combined assemblage as compared to the amount produced by the individual component strains, using the same initial number of cells in the same medium), by applying the range of assays described in Example 6.

### Example 8: Identification of Functional Additivity and Synergy Between DMA Microbes

[0338] This example describes an in vitro analysis of the ability of microbes to enhance the growth or metabolite production of another microbe.

[0339] Microbes often exist in communities where competition and/or mutualism are present between two or more organisms. This concept of microbial mutualism can be harnessed for the development of DMAs where two or more microbes work in together to grow and/or produce compounds to modulate host immunity. Thus, DMA strain selection can involve identification of microbes that synergize in growth or production of host-beneficial metabolites such as indole derivatives, acetate, or propionate. To identify growth and functional synergies between probiotics and plant-derived microbes, a set of two-member DMAs consisting of one probiotic species and one plant derived species were designed (Table 4).

[0340] Microbes are well-known to enhance the growth of one another, often through metabolic cross-feeding, as is seen in cheese production where Lactobacilli spp. produce lactic acid during milk fermentation that is used by propionic acid bacteria to grow (Chamba and Perreard, 2002).

[0341] Combinations consisting of one probiotic species and one additional plant-derived species were evaluated for their ability to grow in a commensal (one microbe's growth is enhanced) or synergistic (enhancement of both microbes' growth) manner in vitro. Briefly, individual microbial strains were grown for 24-48 hours to achieve a high OD in tryptic soy broth (TSB) for bacteria and potato dextrose broth (PDB) for yeast. Cultures were normalized to achieve a uniform density and inoculated into BHI and grown for 48 hours anaerobically. Individual and combination microbes were plated at the beginning and end of the experiment on the appropriate media to enumerate lactic acid bacteria (using MRS medium), Bacillus spp. (using TSA medium with cycloheximide), or yeast (using PDA medium with chlorotetracycline). Commensal interactions were defined as less than 70% change in growth of one organism and a 2-fold or greater enhancement of colony forming units for the other organism. Synergistic interactions were identified when both organisms' growth was enhanced by 2-fold increased colony forming units or more. Table 5 provides examples of commensal and synergistic growth between probiotic species and plant-derived microbial species. For example, note DMA 280, where the first organism's growth increased by a factor of one million and the second organism's growth by tenfold, resulting in a combined growth enhancement of 63,000-fold in the liquid culture, greatly surpassing the simple additive effects of individual growth.

[0342] The production of indole derivatives such as IAA is important for microbe-host interactions and instances of synergistic enhancement of IAA production between microbes has been documented (Cheng et al., 2024). This synergy can be harnessed in DMAs to suppress inflammation.

[0343] Combinations consisting of one probiotic species and one additional plant-derived species were evaluated for their ability to produce indole in an additive or synergistic manner in vitro. Briefly, individual microbial strains were grown for 24-48 hours to achieve a high OD in tryptic soy broth (TSB) for bacteria and potato dextrose broth (PDB) for yeast. Cultures were normalized to achieve a uniform density and inoculated into MTGE supplemented with 0.1% tryptophan and grown for 48 hours aerobically. Cultures were pelleted by centrifugation and supernatants were removed. Indole derivative production was determined by Salkowski assay. Additive production was defined as DMA indole derivative production equivalent to the sum production by each constituent microbe. Synergistic indole derivative production was defined as production by the DMA that exceeded the sum production of the constituent microbes (Table 6). For several DMAs that were synergistic for indole derivatives, only one organism had measurable indole production, implying that co-cultivation enhanced production by the indole-producing partner.

[0344] Synergy in SCFA production is a cornerstone of DMA development. This enhanced SCFA production can have more potent immunomodulatory effects. For example, synergistic acetate production been key in the development of a DMA for bone health (Lawenius et al., 2021).

[0345] Combinations consisting of one probiotic species and one additional plant-derived species were evaluated for their ability to produce acetate or propionate in an additive or synergistic manner in vitro. Briefly, the microbially conditioned supernatant from the growth synergy experiments described above were examined by gas chromatography (GC) for the presence of acetate and propionate, as previously described (Scortichini et al., 2020). Additive production was defined as DMA SCFA production equivalent to the sum production by each constituent microbe. Synergistic SCFA production occurred when DMA production exceeded the sum production of the constituent microbes (Tables 7 and 8). For several DMAs that were synergistic for SCFAs only one organism had measurable SCFA production, implying that co-cultivation enhanced production by the SCFA-producing partner.

[0346] Non-limiting examples of functional synergies demonstrated for microbial growth, acetate production, propionate production, and indole derivative productions are depicted for combinations with Saccharomyces cerevisiae var. boulardii in FIG. 2, for Lactobacillus acidophilus La-14 in FIG. 3, and for Bacillus subtilis DE111 in FIG. 4.

TABLE 4
Strain Composition of DMAs

| DMA | | | | Strain | | | | Strain |
|---|---|---|---|---|---|---|---|---|
| Number | Strain #1 | Genus | Species | ID | Strain #2 | Genus | Species | ID |
| DMA 23 | SBS02335 | Pediococcus | pentosaceus | | SBI00461 | Bacillus | safensis | |
| DMA 24 | SBS02335 | Pediococcus | pentosaceus | | SBI00589 | Bacillus | axarquiensis | |
| DMA 26 | SBS04255 | Leuconostoc | mesenteroides | | SBI00461 | Bacillus | safensis | |
| DMA 27 | SBS04255 | Leuconostoc | mesenteroides | | SBI00589 | Bacillus | axarquiensis | |
| DMA 28 | SBS04255 | Leuconostoc | mesenteroides | | SBI00598 | Bacillus | subtilis | |
| DMA 29 | SBS04255 | Leuconostoc | mesenteroides | | SBI05473 | Saccharomyces | cerevisiae | |
| DMA 30 | SBI04919 | Pediococcus | parvulus | | SBI00461 | Bacillus | safensis | |
| DMA 31 | SBI05399 | Lactiplantibacillus | plantarum | | SBI00461 | Bacillus | safensis | |
| DMA 32 | SBI05399 | Lactiplantibacillus | plantarum | | SBI00598 | Bacillus | subtilis | |
| DMA 33 | SBI05399 | Lactiplantibacillus | plantarum | | SBI05473 | Saccharomyces | cerevisiae | |
| DMA 34 | SBI04256 | Lacticaseibacillus | casei | | SBI00817 | Pichia | fermentans | |
| DMA 37 | SBI04887 | Lacticaseibacillus | casei | | SBI00817 | Pichia | fermentans | |
| DMA 38 | SBI04895 | Lacticaseibacillus | casei | | SBI00817 | Pichia | fermentans | |
| DMA 40 | SBI04887 | Lacticaseibacillus | casei | | SBI01683 | Pichia | fermentans | |
| DMA 43 | SBI04887 | Lacticaseibacillus | casei | | SBS04263 | Pichia | kudriavzevii | |
| DMA 44 | SBI04889 | Lactiplantibacillus | plantarum | | SBS04263 | Pichia | kudriavzevii | |
| DMA 45 | SBI04895 | Lacticaseibacillus | casei | | SBS04263 | Pichia | kudriavzevii | |
| DMA 46 | SBI04256 | Lacticaseibacillus | casei | | SBI00550 | Bacillus | atrophaeus | |
| DMA 48 | SBI04887 | Lacticaseibacillus | casei | | SBI00997 | Bacillus | safensis | |
| DMA 49 | SBI04887 | Lacticaseibacillus | casei | | SBI01819 | Bacillus | pumilus | |
| DMA 50 | SBI04256 | Lacticaseibacillus | casei | | SBI02185 | Bacillus | licheniformis | |
| DMA 51 | SBI04887 | Lacticaseibacillus | casei | | SBI02185 | Bacillus | licheniformis | |
| DMA 52 | SBI04889 | Lactiplantibacillus | plantarum | | SBI02185 | Bacillus | licheniformis | |
| DMA 53 | SBI04887 | Lacticaseibacillus | casei | | SBI04173 | Bacillus | paralicheniformis | |
| DMA 54 | SBI04889 | Lactiplantibacillus | plantarum | | SBI04173 | Bacillus | paralicheniformis | |
| DMA 55 | SBI04895 | Lacticaseibacillus | caset | | SBI04173 | Bacillus | paralicheniformis | |
| DMA 56 | SBI00550 | Bacillus | atrophaeus | | SBI00817 | Pichia | fermentans | |
| DMA 57 | SBI04173 | Bacillus | paralicheniformis | | SBI01187 | Pichia | membranifaciens | |
| DMA 58 | SBI02185 | Bacillus | licheniformis | | SBI01683 | Pichia | fermentans | |
| DMA 59 | SBI04173 | Bacillus | paralicheniformis | | SBI02945 | Meyerozyma | guilliermondii | |
| DMA 61 | SBI02185 | Bacillus | licheniformis | | SBS04263 | Pichia | kudriavzevii | |
| DMA 62 | SBI04173 | Bacillus | paralicheniformis | | SBS04263 | Pichia | kudriavzevii | |
| DMA 64 | SBI01819 | Bacillus | pumilus | | SBI04910 | Pediococcus | ethanolidurans | |
| DMA 65 | SBI02185 | Bacillus | licheniformis | | SBI04910 | Pediococcus | ethanolidurans | |
| DMA 66 | SBI04173 | Bacillus | paralicheniformis | | SBI04910 | Pediococcus | ethanolidurans | |
| DMA 68 | SBI04877 | Bacillus | amyloliquefaciens | | SBI04910 | Pediococcus | ethanolidurans | |
| DMA 69 | SBI00550 | Bacillus | atrophaeus | | SBI04913 | Schleiferilactobacillus | harbinensis | |
| DMA 71 | SBI01819 | Bacillus | pumilus | | SBI04913 | Schleiferilactobacillus | harbinensis | |
| DMA 72 | SBI02185 | Bacillus | licheniformis | | SBI04913 | Schleiferilactobacillus | harbinensis | |
| DMA 73 | SBI04173 | Bacillus | paralicheniformis | | SBI04913 | Schleiferilactobacillus | harbinensis | |
| DMA 75 | SBI04877 | Bacillus | amyloliquefaciens | | SBI04913 | Schleiferilactobacillus | harbinensis | |
| DMA 76 | SBI00997 | Bacillus | safensis | | SBI04916 | Lactococcus | lactis | |
| DMA 77 | SBI03005 | Bacillus | altitudinis | | SBI04918 | Lactococcus | lactis | |
| DMA 78 | SBI00550 | Bacillus | atrophaeus | | SBI05697 | Lactiplantibacillus | plantarum | |
| DMA 79 | SBI00997 | Bacillus | safensis | | SBI05697 | Lactiplantibacillus | plantarum | |
| DMA 80 | SBI01819 | Bacillus | pumilus | | SBI05697 | Lactiplantibacillus | plantarum | |
| DMA 81 | SBI02185 | Bacillus | licheniformis | | SBI05697 | Lactiplantibacillus | plantarum | |
| DMA 82 | SBI04173 | Bacillus | paralicheniformis | | SBI05697 | Lactiplantibacillus | plantarum | |
| DMA 83 | SBI03005 | Bacillus | altitudinis | | SBI05697 | Lactiplantibacillus | plantarum | |
| DMA 84 | SBI04877 | Bacillus | amyloliquefaciens | | SBI05697 | Lactiplantibacillus | plantarum | |
| DMA 85 | SBI04874 | Lentilactobacillus | buchneri | | CS00018 | Saccharomyces | boulardii | |
| DMA 86 | SBI04874 | Lentilactobacillus | buchneri | | SBI05419 | Kazachstania | servazzii | |
| DMA 87 | SBI04874 | Lentilactobacillus | buchneri | | SBI05449 | Kluyveromyces | marxianus | |
| DMA 88 | SBI04874 | Lentilactobacillus | buchneri | | SBI00553 | Bacillus | subtilis | |
| DMA 89 | SBI04874 | Lentilactobacillus | buchneri | | SBI00449 | Exiguobacterium | sp. | |
| DMA 90 | SBI04874 | Lentilactobacillus | buchneri | | SBI00556 | Paenibacillus | sp. | |
| DMA 91 | SBI04874 | Lentilactobacillus | buchneri | | SBI00564 | Bacillus | subtilis | |
| DMA 92 | SBI04873 | Pediococcus | ethanolidurans | | CS00018 | Saccharomyces | boulardii | |
| DMA 93 | SBI04873 | Pediococcus | ethanolidurans | | SBI05449 | Kluyveromyces | marxianus | |
| DMA 94 | SBI04873 | Pediococcus | ethanolidurans | | SBI00553 | Bacillus | subtilis | |
| DMA 97 | SBI04873 | Pediococcus | ethanolidurans | | SBI00564 | Bacillus | subtilis | |
| DMA 98 | CS00010 | Lacticaseibacillus | rhamnosus | Lr-32 | CS00018 | Saccharomyces | boulardii | |
| DMA 99 | CS00010 | Lacticaseibacillus | rhamnosus | Lr-32 | SBI05449 | Kluyveromyces | marxianus | |
| DMA 100 | SBI04902 | Pediococcus | pentosaceus | | SBI00553 | Bacillus | subtilis | |
| DMA 101 | SBI04910 | Pediococcus | ethanolidurans | | CS00018 | Saccharomyces | boulardii | |
| DMA 102 | SBI04910 | Pediococcus | ethanolidurans | | SBI05419 | Kazachstania | servazzii | |
| DMA 103 | SBI04910 | Pediococcus | ethanolidurans | | SBI05449 | Kluyveromyces | marxianus | |
| DMA 104 | SBI04910 | Pediococcus | ethanolidurans | | SBI00553 | Bacillus | subtilis | |
| DMA 107 | SBI04910 | Pediococcus | ethanolidurans | | SBI00564 | Bacillus | subtilis | |
| DMA 108 | SBI04913 | Lactobacillus | harbinensis | | CS00018 | Saccharomyces | boulardii | |
| DMA 109 | SBI04913 | Schleiferilactobacillus | harbinensis | | SBI05449 | Kluyveromyces | marxianus | |
| DMA 110 | SBI04913 | Schleiferilactobacillus | harbinensis | | SBI00553 | Bacillus | subtilis | |
| DMA 114 | SBI05697 | Lactiplantibacillus | plantarum | | CS00018 | Saccharomyces | boulardii | |
| DMA 115 | SBI05697 | Lactiplantibacillus | plantarum | | SBI01679 | Candida | sp. | |
| DMA 116 | SBI05697 | Lactiplantibacillus | plantarum | | SBI05419 | Kazachstania | servazzii | |
| DMA 117 | SBI05697 | Lactiplantibacillus | plantarum | | SBI05449 | Kluyveromyces | marxianus | |
| DMA 118 | SBI05697 | Lactiplantibacillus | plantarum | | SBI05469 | Nakazawaea | ishiwadae | |
| DMA 119 | SBI05697 | Lactiplantibacillus | plantarum | | SBI00553 | Bacillus | subtilis | |
| DMA 120 | SBI05697 | Lactiplantibacillus | plantarum | | SBI00449 | Exiguobacterium | sp. | |
| DMA 121 | SBI05697 | Lactiplantibacillus | plantarum | | SBI00556 | Paenibacillus | sp. | |
| DMA 122 | SBI05697 | Lactiplantibacillus | plantarum | | SBI00564 | Bacillus | subtilis | |
| DMA 123 | SBI05697 | Lactiplantibacillus | plantarum | | SBI00568 | Psychrobacillus | sp. | |
| DMA 124 | SBI00553 | Bacillus | subtilis | | SBI04881 | Lentilactobacillus | buchneri | |
| DMA 125 | SBI00553 | Bacillus | subtilis | | SBI05399 | Lactiplantibacillus | plantarum | |
| DMA 128 | SBI05449 | Kluyveromyces | marxianus | | SBI03599 | Bacillus | endophyticus | |
| DMA 129 | SBI00449 | Exiguobacterium | sp. | | CS00018 | Saccharomyces | boulardii | |
| DMA 130 | SBI00449 | Exiguobacterium | sp. | | SBI05449 | Kluyveromyces | marxianus | |
| DMA 131 | SBI00449 | Exiguobacterium | sp. | | SBS04255 | Leuconostoc | mesenteroides | |
| DMA 132 | SBI00449 | Exiguobacterium | sp. | | SBI04881 | Lentilactobacillus | buchneri | |
| DMA 133 | SBI00449 | Exiguobacterium | sp. | | SBI04919 | Pediococcus | parvulus | |
| DMA 134 | SBI00556 | Paenibacillus | sp. | | CS00018 | Saccharomyces | boulardii | |
| DMA 135 | SBI00556 | Paenibacillus | sp. | | SBI05449 | Kluyveromyces | marxianus | |
| DMA 137 | SBI00556 | Paenibacillus | sp. | | SBI04881 | Lentilactobacillus | buchneri | |
| DMA 138 | SBI00564 | Bacillus | subtilis | | SBI05419 | Kazachstania | servazzii | |
| DMA 139 | SBI00564 | Bacillus | subtilis | | SBI05449 | Kluyveromyces | marxianus | |
| DMA 140 | SBI00564 | Bacillus | subtilis | | SBS04255 | Leuconostoc | mesenteroides | |
| DMA 141 | SBI00564 | Bacillus | subtilis | | SBI04881 | Lentilactobacillus | buchneri | |
| DMA 142 | SBI00564 | Bacillus | subtilis | | SBI04919 | Pediococcus | parvulus | |
| DMA 143 | SBI00564 | Bacillus | subtilis | | SBI04900 | Leuconostoc | pseudomesenteroides | |
| DMA 379 | SBI00564 | Bacillus | subtilis | | SBI05399 | Lactiplantibacillus | plantarum | |
| DMA 145 | SBI00568 | Psychrobacillus | sp. | | SBI05399 | Lactiplantibacillus | plantarum | |
| DMA 146 | SBI01595 | Bacillus | amyloliquefaciens | | CS00018 | Saccharomyces | boulardii | |
| DMA 147 | SBI01595 | Bacillus | amyloliquefaciens | | SBI05419 | Kazachstania | servazzii | |
| DMA 148 | SBI01595 | Bacillus | amyloliquefaciens | | SBI05449 | Kluyveromyces | marxianus | |
| DMA 149 | SBI01595 | Bacillus | amyloliquefaciens | | SBI05469 | Nakazawaea | ishiwadae | |
| DMA 150 | SBI01595 | Bacillus | amyloliquefaciens | | SBS02335 | Pediococcus | pentosaceus | |
| DMA 151 | SBI01595 | Bacillus | amyloliquefaciens | | SBI04881 | Lentilactobacillus | buchneri | |
| DMA 152 | SBI01595 | Bacillus | amyloliquefaciens | | SBI04919 | Pediococcus | parvulus | |
| DMA 153 | SBI01595 | Bacillus | amyloliquefaciens | | SBI04900 | Leuconostoc | pseudomesenteroides | |
| DMA 154 | SBI01595 | Bacillus | amyloliquefaciens | | SBI05399 | Lactiplantibacillus | plantarum | |
| DMA 155 | SBI01679 | Candida | sp. | | SBI00592 | Bacillus | mojavensis | |
| DMA 156 | SBI01683 | Pichia | fermentans | | SBI00592 | Bacillus | mojavensis | |
| DMA 157 | SBS04263 | Pichia | kudriavzevii | | SBI00592 | Bacillus | mojavensis | |
| DMA 158 | SBI01679 | Candida | sp. | | SBI00693 | Bacillus | subtilis | |
| DMA 159 | SBI01683 | Pichia | fermentans | | SBI00693 | Bacillus | subtilis | |
| DMA 160 | SBS04263 | Pichia | kudriavzevii | | SBI00693 | Bacillus | subtilis | |
| DMA 161 | SBI01187 | Pichia | membranifaciens | | SBI00714 | Bacillus | subtilis | |
| DMA 162 | SBI01679 | Candida | sp. | | SBI00714 | Bacillus | subtilis | |
| DMA 163 | SBI01683 | Pichia | fermentans | | SBI00714 | Bacillus | subtilis | |
| DMA 164 | SBI02945 | Meyerozyma | guilliermondii | | SBI00714 | Bacillus | subtilis | |
| DMA 165 | SBS04263 | Pichia | kudriavzevii | | SBI00714 | Bacillus | subtilis | |
| DMA 166 | SBI01187 | Pichia | membranifaciens | | SBI02181 | Bacillus | amyloliquefaciens | |
| DMA 167 | SBS04263 | Pichia | kudriavzevii | | SBI02181 | Bacillus | amyloliquefaciens | |
| DMA 168 | SBI01187 | Pichia | membranifaciens | | SBI02354 | Bacillus | pumilus | |
| DMA 169 | SBI01292 | Talaromyces | atroroseus | | SBI02354 | Bacillus | pumilus | |
| DMA 170 | SBI01679 | Candida | sp. | | SBI02354 | Bacillus | pumilus | |
| DMA 171 | SBI01683 | Pichia | fermentans | | SBI02354 | Bacillus | pumilus | |
| DMA 172 | SBS04263 | Pichia | kudriavzevii | | SBI02354 | Bacillus | pumilus | |
| DMA 178 | SBI03602 | Bacillus | subtilis | | SBI01187 | Pichia | membranifaciens | |
| DMA 179 | SBI01187 | Pichia | membranifaciens | | SBI04006 | Bacillus | subtilis | |
| DMA 180 | SBI01679 | Candida | sp. | | SBI04006 | Bacillus | subtilis | |
| DMA 181 | SBI01187 | Pichia | membranifaciens | | CS00001 | Bacillus | subtilis | DE111 |
| DMA 182 | SBS04263 | Pichia | kudriavzevii | | CS00001 | Bacillus | subtilis | DE111 |
| DMA 183 | SBI01679 | Candida | sp. | | SBS04260 | Lactiplantibacillus | plantarum | |
| DMA 184 | SBI04932 | Galactomyces | geotrichum | | SBI00592 | Bacillus | mojavensis | |
| DMA 185 | SBI05419 | Kazachstania | servazzii | | SBI00592 | Bacillus | mojavensis | |
| DMA 186 | SBI05449 | Kluyveromyces | marxianus | | SBI00592 | Bacillus | mojavensis | |
| DMA 187 | SBI00264 | Clavispora | sp. | | SBI00592 | Bacillus | mojavensis | |
| DMA 188 | SBS00319 | Debaryomyces | hansenii | | SBI00592 | Bacillus | mojavensis | |
| DMA 189 | SBI03199 | Candida | dosseyi | | SBI00592 | Bacillus | mojavensis | |
| DMA 190 | SBI05473 | Saccharomyces | cerevisiae | | SBI00592 | Bacillus | mojavensis | |
| DMA 191 | SBI04932 | Galactomyces | geotrichum | | SBI00693 | Bacillus | subtilis | |
| DMA 192 | SBI05419 | Kazachstania | servazzii | | SBI00693 | Bacillus | subtilis | |
| DMA 193 | SBI05449 | Kluyveromyces | marxianus | | SBI00693 | Bacillus | subtilis | |
| DMA 194 | SBI00264 | Clavispora | sp. | | SBI00693 | Bacillus | subtilis | |
| DMA 195 | SBS04254 | Levilactobacillus | brevis | | SBI00120 | Holtermanniella | takashimae | |
| DMA 196 | SBI04916 | Lactococcus | lactis | | SBI00120 | Holtermanniella | takashimae | |
| DMA 197 | SBS04260 | Lactiplantibacillus | plantarum | | SBI00120 | Holtermanniella | takashimae | |
| DMA 198 | SBI01292 | Talaromyces | atroroseus | | SBI04918 | Lactococcus | lactis | |
| DMA 199 | SBI01292 | Talaromyces | atroroseus | | SBS04260 | Lactiplantibacillus | plantarum | |
| DMA 200 | SBI03599 | Bacillus | endophyticus | | SBI04916 | Lactococcus | lactis | |
| DMA 201 | SBS04260 | Lactiplantibacillus | plantarum | | SBI03599 | Bacillus | endophyticus | |
| DMA 202 | SBS04260 | Lactiplantibacillus | plantarum | | SBI00592 | Bacillus | mojavensis | |
| DMA 203 | SBS04260 | Lactiplantibacillus | plantarum | | SBI00693 | Bacillus | subtilis | |
| DMA 204 | SBS04260 | Lactiplantibacillus | plantarum | | SBI00714 | Bacillus | subtilis | |
| DMA 205 | SBS04260 | Lactiplantibacillus | plantarum | | SBI02181 | Bacillus | amyloliquefaciens | |
| DMA 206 | SBS04260 | Lactiplantibacillus | plantarum | | SBI04006 | Bacillus | subtilis | |
| DMA 207 | SBI00592 | Bacillus | mojavensis | | SBI00120 | Kwoniella | shandongens | |
| DMA 208 | SBI00120 | Kwoniella | shandongens | | SBI00693 | Bacillus | subtilis | |
| DMA 209 | SBI00714 | Bacillus | subtilis | | SBI00120 | Kwoniella | shandongens | |
| DMA 210 | SBI00120 | Kwoniella | shandongens | | SBI02181 | Bacillus | amyloliquefaciens | |
| DMA 211 | SBI00120 | Kwoniella | shandongens | | SBI04006 | Bacillus | subtilis | |
| DMA 214 | SBI01292 | Talaromyces | atroroseus | | SBI00592 | Bacillus | mojavensis | |
| DMA 215 | SBI01292 | Talaromyces | atroroseus | | SBI00693 | Bacillus | subtilis | |
| DMA 216 | SBI01292 | Talaromyces | atroroseus | | SBI00714 | Bacillus | subtilis | |
| DMA 217 | SBI01292 | Talaromyces | atroroseus | | SBI04006 | Bacillus | subtilis | |
| DMA 219 | SBI00693 | Bacillus | subtilis | | SBI04256 | Lacticaseibacillus | casei | |
| DMA 220 | SBI00714 | Bacillus | subtilis | | SBI04256 | Lacticaseibacillus | casei | |
| DMA 221 | SBI04006 | Bacillus | subtilis | | SBI04256 | Lacticaseibacillus | casei | |
| DMA 222 | SBI00461 | Bacillus | safensis | | SBI04256 | Lacticaseibacillus | casei | |
| DMA 223 | SBI04259 | Weisella | cibaria | | SBI00592 | Bacillus | mojavensis | |
| DMA 224 | SBI04259 | Weisella | cibaria | | SBI00714 | Bacillus | subtilis | |
| DMA 225 | SBI00714 | Bacillus | subtilis | | SBI04881 | Lentilactobacillus | buchneri | |
| DMA 226 | SBI04006 | Bacillus | subtilis | | SBI04881 | Lentilactobacillus | buchneri | |
| DMA 227 | SBI04881 | Lentilactobacillus | buchneri | | SBI00461 | Bacillus | safensis | |
| DMA 228 | SBI04006 | Bacillus | subtilis | | SBI04884 | Enterococcus | gilvus | |
| DMA 230 | SBI03599 | Bacillus | endophyticus | | SBI04887 | Lacticaseibacillus | casei | |
| DMA 231 | SBI00592 | Bacillus | mojavensis | | SBI04887 | Lacticaseibacillus | casei | |
| DMA 232 | SBI00693 | Bacillus | subtilis | | SBI04887 | Lacticaseibacillus | casei | |
| DMA 233 | SBI00714 | Bacillus | subtilis | | SBI04887 | Lacticaseibacillus | casei | |
| DMA 235 | SBI02181 | Bacillus | amyloliquefaciens | | SBI04887 | Lacticaseibacillus | casei | |
| DMA 236 | SBI04006 | Bacillus | subtilis | | SBI04887 | Lacticaseibacillus | casei | |
| DMA 237 | SBI00461 | Bacillus | safensis | | SBI04887 | Lacticaseibacillus | casei | |
| DMA 238 | SBI04874 | Lentilactobacillus | buchneri | | SBI00225 | Clavispora | sp. | |
| DMA 239 | CS00008 | Lactobacillus | acidophilus | La-14 | SBI01292 | Talaromyces | atroroseus | |
| DMA 240 | SBI04874 | Lentilactobacillus | buchneri | | SBI01292 | Talaromyces | atroroseus | |
| DMA 241 | CS00010 | Lacticaseibacillus | rhamnosus | Lr-32 | SBI01292 | Talaromyces | atroroseus | |
| DMA 242 | CS00008 | Lactobacillus | acidophilus | La-14 | CS00018 | Saccharomyces | boulardii | |
| DMA 243 | SBS04254 | Levilactobacillus | brevis | | CS00018 | Saccharomyces | boulardii | |
| DMA 244 | SBI05579 | Streptococcus | thermophilus | | SBI03599 | Bacillus | endophyticus | |
| DMA 245 | CS00001 | Bacillus | subtilis | DE111 | SBI04874 | Lentilactobacillus | buchneri | |
| DMA 246 | CS00008 | Lactobacillus | acidophilus | La-14 | SBI00589 | Bacillus | axarquiensis | |
| DMA 247 | SBS04254 | Levilactobacillus | brevis | | SBI00589 | Bacillus | axarquiensis | |
| DMA 248 | SBI04874 | Lentilactobacillus | buchneri | | SBI00589 | Bacillus | axarquiensis | |
| DMA 249 | SBI00598 | Bacillus | subtilis | | SBI04874 | Lentilactobacillus | buchneri | |
| DMA 250 | CS00008 | Lactobacillus | acidophilus | La-14 | SBI01595 | Bacillus | amyloliquefaciens | |
| DMA 251 | SBI01595 | Bacillus | amyloliquefaciens | | SBI04874 | Lentilactobacillus | buchneri | |
| DMA 252 | CS00008 | Lactobacillus | acidophilus | La-14 | SBI03602 | Bacillus | subtilis | |
| DMA 253 | CS00008 | Lactobacillus | acidophilus | La-14 | SBI04877 | Bacillus | amyloliquefaciens | |
| DMA 254 | SBI04877 | Bacillus | amyloliquefaciens | | SBI04874 | Lentilactobacillus | buchneri | |
| DMA 255 | CS00007 | Lactiplantibacillus | plantarum | 299V | SBI00461 | Bacillus | safensis | |
| DMA 256 | SBI01292 | Talaromyces | atroroseus | | CS00001 | Bacillus | subtilis | DE111 |
| DMA 258 | SBI04877 | Bacillus | amyloliquefaciens | | SBI01292 | Talaromyces | atroroseus | |
| DMA 260 | CS00001 | Bacillus | subtilis | DE111 | CS00018 | Saccharomyces | boulardii | |
| DMA 261 | SBI00589 | Bacillus | axarquiensis | | CS00018 | Saccharomyces | boulardii | |
| DMA 262 | SBI00598 | Bacillus | subtilis | | CS00018 | Saccharomyces | boulardii | |
| DMA 263 | SBI04877 | Bacillus | amyloliquefaciens | | CS00018 | Saccharomyces | boulardii | |
| DMA 264 | SBI00644 | Bacillus | aryabhattai | | CS00018 | Saccharomyces | boulardii | |
| DMA 265 | SBI05473 | Saccharomyces | cerevisiae | | SBI04916 | Lactococcus | lactis | |
| DMA 266 | SBS00319 | Debaryomyces | hansenii | | SBI00693 | Bacillus | subtilis | |
| DMA 267 | SBI03199 | Candida | dosseyi | | SBI00693 | Bacillus | subtilis | |
| DMA 268 | SBI05473 | Saccharomyces | cerevisiae | | SBI00693 | Bacillus | subtilis | |
| DMA 269 | SBI04932 | Galactomyces | geotrichum | | SBI00714 | Bacillus | subtilis | |
| DMA 270 | SBI05419 | Kazachstania | servazzii | | SBI00714 | Bacillus | subtilis | |
| DMA 271 | SBI05449 | Kluyveromyces | marxianus | | SBI00714 | Bacillus | subtilis | |
| DMA 272 | SBI00264 | Clavispora | sp. | | SBI00714 | Bacillus | subtilis | |
| DMA 273 | SBS00319 | Debaryomyces | hansenii | | SBI00714 | Bacillus | subtilis | |
| DMA 274 | SBI03199 | Candida | dosseyi | | SBI00714 | Bacillus | subtilis | |
| DMA 275 | CS00001 | Bacillus | subtilis | DE111 | SBI04873 | Pediococcus | ethanolidurans | |
| DMA 276 | SBI00589 | Bacillus | axarquiensis | | SBI04873 | Pediococcus | ethanolidurans | |
| DMA 277 | SBI00598 | Bacillus | subtilis | | SBI04873 | Pediococcus | ethanolidurans | |
| DMA 278 | SBI01595 | Bacillus | amyloliquefaciens | | SBI04873 | Pediococcus | ethanolidurans | |
| DMA 279 | SBI03602 | Bacillus | subtilis | | SBI04873 | Pediococcus | ethanolidurans | |
| DMA 280 | SBI04877 | Bacillus | amyloliquefaciens | | SBI04873 | Pediococcus | ethanolidurans | |
| DMA 282 | SBI05449 | Kluyveromyces | marxianus | | SBI02181 | Bacillus | amyloliquefaciens | |
| DMA 283 | SBI03199 | Candida | dosseyi | | SBI02181 | Bacillus | amyloliquefaciens | |
| DMA 284 | SBI05473 | Saccharomyces | cerevisiae | | SBI02181 | Bacillus | amyloliquefaciens | |
| DMA 285 | SBI00644 | Bacillus | aryabhattai | | SBI04874 | Lentilactobacillus | buchneri | |
| DMA 286 | SBI04932 | Galactomyces | geotrichum | | SBI02354 | Bacillus | pumilus | |
| DMA 287 | SBI05419 | Kazachstania | servazzii | | SBI02354 | Bacillus | pumilus | |
| DMA 288 | SBI05449 | Kluyveromyces | marxianus | | SBI02354 | Bacillus | pumilus | |
| DMA 289 | SBI00264 | Clavispora | sp. | | SBI02354 | Bacillus | pumilus | |
| DMA 290 | SBS00319 | Debaryomyces | hansenii | | SBI02354 | Bacillus | pumilus | |
| DMA 291 | SBI03199 | Candida | dosseyi | | SBI02354 | Bacillus | pumilus | |
| DMA 294 | SBI01681 | Candida | akabanensis | | SBI00592 | Bacillus | mojavensis | |
| DMA 295 | SBI05473 | Saccharomyces | cerevisiae | | SBI02354 | Bacillus | pumilus | |
| DMA 296 | SBI05469 | Nakazawaea | ishiwadae | | SBI00592 | Bacillus | mojavensis | |
| DMA 297 | SBI01681 | Candida | akabanensis | | SBI00693 | Bacillus | subtilis | |
| DMA 298 | SBI05469 | Nakazawaea | ishiwadae | | SBI00693 | Bacillus | subtilis | |
| DMA 299 | SBI01681 | Candida | akabanensis | | SBI00714 | Bacillus | subtilis | |
| DMA 300 | SBI05469 | Nakazawaea | ishiwadae | | SBI00714 | Bacillus | subtilis | |
| DMA 301 | SBI05469 | Nakazawaea | ishiwadae | | SBI02181 | Bacillus | amyloliquefaciens | |
| DMA 302 | SBI01681 | Candida | akabanensis | | SBI03602 | Bacillus | subtilis | |
| DMA 304 | SBI05469 | Nakazawaea | ishiwadae | | SBI03602 | Bacillus | subtilis | |
| DMA 305 | SBI00120 | Holtermanniella | takashimae | | SBI03602 | Bacillus | subtilis | |
| DMA 306 | SBI01681 | Candida | akabanensis | | SBI04006 | Bacillus | subtilis | |
| DMA 307 | SBI05469 | Nakazawaea | ishiwadae | | SBI04006 | Bacillus | subtilis | |
| DMA 308 | SBI01681 | Candida | akabanensis | | CS00001 | Bacillus | subtilis | DE111 |
| DMA 309 | SBI00264 | Clavispora | sp. | | SBI03599 | Bacillus | endophyticus | |
| DMA 310 | SBI05469 | Nakazawaea | ishiwadae | | CS00001 | Bacillus | subtilis | DE111 |
| DMA 311 | SBI00120 | Holtermanniella | takashimae | | CS00001 | Bacillus | subtilis | DE111 |
| DMA 313 | SBS00319 | Debaryomyces | hansenii | | SBI03599 | Bacillus | endophyticus | |
| DMA 314 | SBI05469 | Nakazawaea | ishiwadae | | SBI00589 | Bacillus | axarquiensis | |
| DMA 317 | SBI01681 | Candida | akabanensis | | SBI05579 | Streptococcus | thermophilus | |
| DMA 319 | SBS00319 | Debaryomyces | hansenii | | SBI05579 | Streptococcus | thermophilus | |
| DMA 320 | SBI03199 | Candida | dosseyi | | SBI05579 | Streptococcus | thermophilus | |
| DMA 321 | SBI05473 | Saccharomyces | cerevisiae | | CS00007 | Lactiplantibacillus | plantarum | 299V |
| DMA 322 | SBI01681 | Candida | akabanensis | | CS00007 | Lactiplantibacillus | plantarum | 299V |
| DMA 323 | SBS00208 | Pichia | terricola | | CS00007 | Lactiplantibacillus | plantarum | 299V |
| DMA 324 | SBS00319 | Debaryomyces | hansenii | | CS00007 | Lactiplantibacillus | plantarum | 299V |
| DMA 325 | SBI03199 | Candida | dosseyi | | CS00007 | Lactiplantibacillus | plantarum | 299V |
| DMA 326 | SBI05473 | Saccharomyces | cerevisiae | | SBI04918 | Lactococcus | lactis | |
| DMA 327 | SBI05473 | Saccharomyces | cerevisiae | | SBI04889 | Lactiplantibacillus | plantarum | |
| DMA 328 | SBI01681 | Candida | akabanensis | | SBI04889 | Lactiplantibacillus | plantarum | |
| DMA 329 | SBI03199 | Candida | dosseyi | | SBI04889 | Lactiplantibacillus | plantarum | |
| DMA 330 | SBI05473 | Saccharomyces | cerevisiae | | SBI04895 | Lacticaseibacillus | casei | |
| DMA 331 | SBI01681 | Candida | akabanensis | | SBI04895 | Lacticaseibacillus | casei | |
| DMA 332 | SBI03199 | Candida | dosseyi | | SBI04895 | Lacticaseibacillus | casei | |
| DMA 333 | SBI05473 | Saccharomyces | cerevisiae | | SBS04260 | Lactiplantibacillus | plantarum | |
| DMA 334 | SBI01681 | Candida | akabanensis | | SBS04260 | Lactiplantibacillus | plantarum | |
| DMA 335 | SBI01681 | Candida | akabanensis | | CS00008 | Lactobacillus | acidophilus | La-14 |
| DMA 336 | SBS00208 | Pichia | terricola | | CS00008 | Lactobacillus | acidophilus | La-14 |
| DMA 337 | SBS00319 | Debaryomyces | hansenii | | CS00008 | Lactobacillus | acidophilus | La-14 |
| DMA 338 | SBI03199 | Candida | dosseyi | | CS00008 | Lactobacillus | acidophilus | La-14 |
| DMA 339 | SBI01681 | Candida | akabanensis | | SBI04916 | Lactococcus | lactis | |
| DMA 340 | SBI03199 | Candida | dosseyi | | SBI04916 | Lactococcus | lactis | |
| DMA 341 | SBI05473 | Saccharomyces | cerevisiae | | SBI00598 | Bacillus | subtilis | |
| DMA 342 | SBI01681 | Candida | akabanensis | | SBI00598 | Bacillus | subtilis | |
| DMA 343 | SBI04932 | Galactomyces | geotrichum | | SBI03602 | Bacillus | subtilis | |
| DMA 344 | SBS00319 | Debaryomyces | hansenii | | SBI00598 | Bacillus | subtilis | |
| DMA 345 | SBI03199 | Candida | dosseyi | | SBI00598 | Bacillus | subtilis | |
| DMA 346 | SBI05473 | Saccharomyces | cerevisiae | | SBI00644 | Bacillus | aryabhattai | |
| DMA 348 | SBI05419 | Kazachstania | servazzii | | SBI03602 | Bacillus | subtilis | |
| DMA 349 | SBI05449 | Kluyveromyces | marxianus | | SBI03602 | Bacillus | subtilis | |
| DMA 350 | SBI00264 | Clavispora | sp. | | SBI03602 | Bacillus | subtilis | |
| DMA 351 | SBS00319 | Debaryomyces | hansenii | | SBI03602 | Bacillus | subtilis | |
| DMA 352 | SBI03199 | Candida | dosseyi | | SBI03602 | Bacillus | subtilis | |
| DMA 353 | SBI05449 | Kluyveromyces | marxianus | | SBI04006 | Bacillus | subtilis | |
| DMA 354 | SBI03199 | Candida | dosseyi | | SBI04006 | Bacillus | subtilis | |
| DMA 355 | SBI04932 | Galactomyces | geotrichum | | CS00001 | Bacillus | subtilis | DE111 |
| DMA 356 | SBI05449 | Kluyveromyces | marxianus | | CS00001 | Bacillus | subtilis | DE111 |
| DMA 357 | SBI03199 | Candida | dosseyi | | CS00001 | Bacillus | subtilis | DE111 |
| DMA 358 | SBI04932 | Galactomyces | geotrichum | | SBI04918 | Lactococcus | lactis | |
| DMA 359 | SBI05449 | Kluyveromyces | marxianus | | SBI04918 | Lactococcus | lactis | |
| DMA 360 | SBI00449 | Exiguobacterium | sp. | | SBI05473 | Saccharomyces | cerevisiae | |
| DMA 361 | CS00017 | Lacticaseibacillus | paracasei | Shirota | SBI00564 | Bacillus | subtilis | |
| DMA 362 | CS00017 | Lacticaseibacillus | paracasei | Shirota | SBI01595 | Bacillus | amyloliquefaciens | |
| DMA 363 | SBI04880 | Pediococcus | pentosaceus | | SBI05449 | Kluyveromyces | marxianus | |
| DMA 364 | CS00017 | Lacticaseibacillus | paracasei | Shirota | SBI05449 | Kluyveromyces | marxianus | |
| DMA 365 | SBI04880 | Pediococcus | pentosaceus | | CS00018 | Saccharomyces | boulardii | |
| DMA 366 | CS00017 | Lacticaseibacillus | paracasei | Shirota | CS00018 | Saccharomyces | boulardii | |
| DMA 369 | SBI00553 | Bacillus | subtilis | | SBI00817 | Pichia | fermentans | |
| DMA 370 | SBI00564 | Bacillus | subtilis | | SBI05473 | Saccharomyces | cerevisiae | |
| DMA 371 | SBI01595 | Bacillus | amyloliquefaciens | | SBI00817 | Pichia | fermentans | |
| DMA 372 | SBI01595 | Bacillus | amyloliquefaciens | | SBS04263 | Pichia | kudriavzevii | |
| DMA 373 | SBI01595 | Bacillus | amyloliquefaciens | | SBI05473 | Saccharomyces | cerevisiae | |
| DMA 375 | SBI04011 | Bacillus | megaterium | | SBI00817 | Pichia | fermentans | |
| DMA 376 | SBI04011 | Bacillus | megaterium | | SBI05473 | Saccharomyces | cerevisiae | |
| DMA 377 | CS00020 | Weizmannia | coagulans | BC30 | SBI00817 | Pichia | membranifaciens | |
| DMA 378 | CS00020 | Weizmannia | coagulans | BC30 | SBI05473 | Saccharomyces | cerevisiae | |
| DMA 380 | SBI05579 | Streptococcus | thermophilus | | SBI03602 | Bacillus | subtilis | |
| DMA 381 | SBI04259 | Weisella | cibaria | | SBI03602 | Bacillus | subtilis | |

TABLE 5
Growth Commensalism and Synergy in DMAs

| | | | | | | | | | Combination | Combination | Fold Change |
|---|---|---|---|---|---|---|---|---|---|---|---|
| | | | | | | | | | Growth Fold | Growth Fold | Over |
| DMA | Microbe | | | Strain | Microbe | | | Strain | Change | Change | Expected |
| # | #1 | Genus | Species | ID | #2 | Genus | Species | ID | Microbe #1 | Microbe #2 | Total Growth |
| DMA | SBS02335 | Pediococcus | pentosaceus | | SBI00461 | Bacillus | safensis | | 6153.85 | 0.92 | 2.15 |
| 23 | | | | | | | | | | | |
| DMA | SBS02335 | Pediococcus | pentosaceus | | SBI00589 | Bacillus | axarquiensis | | 2000 | 0.31 | 1.54 |
| 24 | | | | | | | | | | | |
| DMA | SBS04255 | Leuconostoc | mesenteroides | | SBI00461 | Bacillus | safensis | | 3846.15 | 0.37 | 3 |
| 26 | | | | | | | | | | | |
| DMA | SBS04255 | Leuconostoc | mesenteroides | | SBI00589 | Bacillus | axarquiensis | | 1500 | 1.95 | 5.09 |
| 27 | | | | | | | | | | | |
| DMA | SBS04255 | Leuconostoc | mesenteroides | | SBI00598 | Bacillus | subtilis | | 5384.62 | 3.68 | 7.36 |
| 28 | | | | | | | | | | | |
| DMA | SBS04255 | Leuconostoc | mesenteroides | | SBI05473 | Saccharomyces | cerevisiae | | 0.69 | 2.63 | 2.62 |
| 29 | | | | | | | | | | | |
| DMA | SBI04919 | Pediococcus | parvulus | | SBI00461 | Bacillus | safensis | | 53.85 | 7.78 | 35 |
| 30 | | | | | | | | | | | |
| DMA | SBI05399 | Lactiplantibacillus | plantarum | | SBI00461 | Bacillus | safensis | | 692.31 | 1.89 | 2.88 |
| 31 | | | | | | | | | | | |
| DMA | SBI05399 | Lactiplantibacillus | plantarum | | SBI00598 | Bacillus | subtilis | | 923.08 | 6.67 | 7.99 |
| 32 | | | | | | | | | | | |
| DMA | SBI05399 | Lactiplantibacillus | plantarum | | SBI05473 | Saccharomyces | cerevisiae | | 0.44 | 7.78 | 7.65 |
| 33 | | | | | | | | | | | |
| DMA | SBI04256 | Lacticaseibacillus | casei | | SBI00817 | Pichia | fermentans | | 0.44 | 25.71 | 25.71 |
| 34 | | | | | | | | | | | |
| DMA | SBI04895 | Lacticaseibacillus | casei | | SBI00817 | Pichia | fermentans | | 0.31 | 23.81 | 23.81 |
| 38 | | | | | | | | | | | |
| DMA | SBI04887 | Lacticaseibacillus | casei | | SBS04263 | Pichia | kudriavzevii | | 0.3 | 56521.74 | 48148.19 |
| 43 | | | | | | | | | | | |
| DMA | SBI04889 | Lactiplantibacillus | plantarum | | SBS04263 | Pichia | kudriavzevii | | 2.25 | 100 | 99.98 |
| 44 | | | | | | | | | | | |
| DMA | SBI04895 | Lacticaseibacillus | casei | | SBS04263 | Pichia | kudriavzevii | | 0.33 | 2.86 | 2.86 |
| 45 | | | | | | | | | | | |
| DMA | SBI04887 | Lacticaseibacillus | casei | | SBI00997 | Bacillus | safensis | | 1.09 | 652.17 | 326.63 |
| 48 | | | | | | | | | | | |
| DMA | SBI04887 | Lacticaseibacillus | casei | | SBI01819 | Bacillus | pumilus | | 62.5 | 0.3 | 16.35 |
| 49 | | | | | | | | | | | |
| DMA | SBI04887 | Lacticaseibacillus | casei | | SBI04173 | Bacillus | paralicheniformis | | 2 | 39.13 | 21.86 |
| 53 | | | | | | | | | | | |
| DMA | SBI04895 | Lacticaseibacillus | casei | | SBI04173 | Bacillus | paralicheniformis | | 0.35 | 4.29 | 4.28 |
| 55 | | | | | | | | | | | |
| DMA | SBI01819 | Bacillus | pumilus | | SBI04910 | Pediococcus | ethanolidurans | | 0.53 | 25 | 8.36 |
| 64 | | | | | | | | | | | |
| DMA | SBI02185 | Bacillus | licheniformis | | SBI04910 | Pediococcus | ethanolidurans | | 88.24 | 0.57 | 17.7 |
| 65 | | | | | | | | | | | |
| DMA | SBI04173 | Bacillus | paralicheniformis | | SBI04910 | Pediococcus | ethanolidurans | | 29.41 | 0.5 | 13.78 |
| 66 | | | | | | | | | | | |
| DMA | SBI04877 | Bacillus | amyloliquefaciens | | SBI04910 | Pediococcus | ethanolidurans | | 1 | 571.43 | 167.38 |
| 68 | | | | | | | | | | | |
| DMA | SBI01819 | Bacillus | pumilus | | SBI04913 | Schleiferilactobacillus | harbinensis | | 0.79 | 112.5 | 33.89 |
| 71 | | | | | | | | | | | |
| DMA | SBI02185 | Bacillus | licheniformis | | SBI04913 | Schleiferilactobacillus | harbinensis | | 42.11 | 0.56 | 9.43 |
| 72 | | | | | | | | | | | |
| DMA | SBI04173 | Bacillus | paralicheniformis | | SBI04913 | Schleiferilactobacillus | harbinensis | | 5.26 | 1.5 | 3.33 |
| 73 | | | | | | | | | | | |
| DMA | SBI04877 | Bacillus | amyloliquefaciens | | SBI04913 | Schleiferilactobacillus | harbinensis | | 4.74 | 5714.29 | 1541.92 |
| 75 | | | | | | | | | | | |
| DMA | SBI00997 | Bacillus | safensis | | SBI04916 | Lactococcus | lactis | | 11.36 | 0.39 | 11.36 |
| 76 | | | | | | | | | | | |
| DMA | SBI04874 | Lentilactobacillus | buchneri | | CS00018 | Saccharomyces | boulardii | | 25 | 4 | 4.81 |
| 85 | | | | | | | | | | | |
| DMA | SBI04874 | Lentilactobacillus | buchneri | | SBI05449 | Kluyveromyces | marxianus | | 300 | 1.4 | 1.7 |
| 87 | | | | | | | | | | | |
| DMA | SBI04874 | Lentilactobacillus | buchneri | | SBI00553 | Bacillus | subtilis | | 50 | 1.4 | 7.37 |
| 88 | | | | | | | | | | | |
| DMA | SBI04873 | Pediococcus | ethanolidurans | | CS00018 | Saccharomyces | boulardii | | 5 | 666.67 | 19.56 |
| 92 | | | | | | | | | | | |
| DMA | SBI04873 | Pediococcus | ethanolidurans | | SBI05449 | Kluyveromyces | marxianus | | 800 | 1111.11 | 947.37 |
| 93 | | | | | | | | | | | |
| DMA | SBI04873 | Pediococcus | ethanolidurans | | SBI00553 | Bacillus | subtilis | | 35.71 | 122.22 | 36.27 |
| 94 | | | | | | | | | | | |
| DMA | SBI04873 | Pediococcus | ethanolidurans | | SBI00564 | Bacillus | subtilis | | 10.67 | 66.67 | 11 |
| 97 | | | | | | | | | | | |
| DMA | CS00010 | Lacticaseibacillus | rhamnosus | Lr-32 | SBI05449 | Kluyveromyces | marxianus | | 300 | 1.03 | 1.03 |
| 99 | | | | | | | | | | | |
| DMA | SBI04910 | Pediococcus | ethanolidurans | | CS00018 | Saccharomyces | boulardii | | 1.5 | 11.25 | 3.13 |
| 101 | | | | | | | | | | | |
| DMA | SBI04910 | Pediococcus | ethanolidurans | | SBI05449 | Kluyveromyces | marxianus | | 30 | 3.75 | 6.67 |
| 103 | | | | | | | | | | | |
| DMA | SBI04910 | Pediococcus | ethanolidurans | | SBI00553 | Bacillus | subtilis | | 5 | 12.5 | 5.41 |
| 104 | | | | | | | | | | | |
| DMA | SBI04910 | Pediococcus | ethanolidurans | | SBI00564 | Bacillus | subtilis | | 1.93 | 10 | 2.34 |
| 107 | | | | | | | | | | | |
| DMA | SBI04913 | Lactobacillus | harbinensis | | CS00018 | Saccharomyces | boulardii | | 0.5 | 7.69 | 2.26 |
| 108 | | | | | | | | | | | |
| DMA | SBI04913 | Schleiferilactobacillus | harbinensis | | SBI05449 | Kluyveromyces | marxianus | | 50 | 5.38 | 8.57 |
| 109 | | | | | | | | | | | |
| DMA | SBI04913 | Schleiferilactobacillus | harbinensis | | SBI00553 | Bacillus | subtilis | | 8.57 | 3.08 | 8.1 |
| 110 | | | | | | | | | | | |
| DMA | SBI05697 | Lactiplantibacillus | plantarum | | CS00018 | Saccharomyces | boulardii | | 3 | 18.46 | 18.46 |
| 114 | | | | | | | | | | | |
| DMA | SBI05697 | Lactiplantibacillus | plantarum | | SBI05449 | Kluyveromyces | marxianus | | 80 | 17.69 | 17.69 |
| 117 | | | | | | | | | | | |
| DMA | SBI00553 | Bacillus | subtilis | | SBI04881 | Lentilactobacillus | buchneri | | 183.33 | 78.57 | 110 |
| 124 | | | | | | | | | | | |
| DMA | SBI00449 | Exiguobacterium | sp. | | CS00018 | Saccharomyces | boulardii | | 2.75 | 666.67 | 208.79 |
| 129 | | | | | | | | | | | |
| DMA | SBI00449 | Exiguobacterium | sp. | | SBI05449 | Kluyveromyces | marxianus | | 300 | 500 | 489.47 |
| 130 | | | | | | | | | | | |
| DMA | SBI00449 | Exiguobacterium | sp. | | SBI04881 | Lentilactobacillus | buchneri | | 1666.67 | 55.56 | 1294.87 |
| 132 | | | | | | | | | | | |
| DMA | SBI00449 | Exiguobacterium | sp. | | SBI04919 | Pediococcus | parvulus | | 0.33 | 50 | 18.96 |
| 133 | | | | | | | | | | | |
| DMA | SBI00564 | Bacillus | subtilis | | SBI04881 | Lentilactobacillus | buchneri | | 2166.67 | 106.67 | 695.24 |
| 141 | | | | | | | | | | | |
| DMA | SBI00564 | Bacillus | subtilis | | SBI04919 | Pediococcus | parvulus | | 266.67 | 12 | 54.44 |
| 142 | | | | | | | | | | | |
| DMA | SBI01595 | Bacillus | amyloliquefaciens | | SBI05449 | Kluyveromyces | marxianus | | 13 | 10 | 10.3 |
| 148 | | | | | | | | | | | |
| DMA | SBI01595 | Bacillus | amyloliquefaciens | | SBI04919 | Pediococcus | parvulus | | 43.33 | 1.67 | 33.72 |
| 152 | | | | | | | | | | | |
| DMA | SBI01187 | Pichia | membranifaciens | | SBI00714 | Bacillus | subtilis | | 10 | 0.6 | 5.3 |
| 161 | | | | | | | | | | | |
| DMA | SBI02945 | Meyerozyma | guillermondii | | SBI00714 | Bacillus | subtilis | | 10 | 0.67 | 4.91 |
| 164 | | | | | | | | | | | |
| DMA | SBS04263 | Pichia | kudriavzevii | | SBI00714 | Bacillus | subtilis | | 8 | 0.38 | 3.31 |
| 165 | | | | | | | | | | | |
| DMA | SBS04263 | Pichia | kudriavzevii | | SBI02181 | Bacillus | amyloliquefaciens | | 10 | 0.75 | 1.19 |
| 167 | | | | | | | | | | | |
| DMA | SBI01679 | Candida | sp. | | SBI02354 | Bacillus | pumilus | | 18571.43 | 1.25 | 18570.37 |
| 170 | | | | | | | | | | | |
| DMA | SBS04263 | Pichia | kudriavzevii | | SBI02354 | Bacillus | pumilus | | 7.14 | 0.38 | 3.53 |
| 172 | | | | | | | | | | | |
| DMA | SBS04263 | Pichia | kudriavzevii | | CS00001 | Bacillus | subtilis | DE111 | 3000 | 0.63 | 4.37 |
| 182 | | | | | | | | | | | |
| DMA | SBI05449 | Kluyveromyces | marxianus | | SBI00592 | Bacillus | mojavensis | | 10 | 0.5 | 0.95 |
| 186 | | | | | | | | | | | |
| DMA | SBI05449 | Kluyveromyces | marxianus | | SBI00693 | Bacillus | subtilis | | 3.67 | 0.9 | 1.54 |
| 193 | | | | | | | | | | | |
| DMA | SBS04254 | Levilactobacillus | brevis | | SBI00120 | Holtermanniella | takashimae | | 0.75 | 200 | 196.64 |
| 195 | | | | | | | | | | | |
| DMA | SBI00120 | Kwoniella | shandongens | | SBI00693 | Bacillus | subtilis | | 6.67 | 0.56 | 6.49 |
| 208 | | | | | | | | | | | |
| DMA | SBI00120 | Kwoniella | shandongens | | SBI04006 | Bacillus | subtilis | | 60 | 0.44 | 21.71 |
| 211 | | | | | | | | | | | |
| DMA | SBI04881 | Lentilactobacillus | buchneri | | SBI00461 | Bacillus | safensis | | 16153.85 | 1.38 | 3 |
| 227 | | | | | | | | | | | |
| DMA | SBI03599 | Bacillus | endophyticus | | SBI04887 | Lacticaseibacillus | casei | | 6.11 | 300 | 48.1 |
| 230 | | | | | | | | | | | |
| DMA | SBI02181 | Bacillus | amyloliquefaciens | | SBI04887 | Lacticaseibacillus | casei | | 3.89 | 175 | 4.65 |
| 235 | | | | | | | | | | | |
| DMA | SBI04006 | Bacillus | subtilis | | SBI04887 | Lacticaseibacillus | casei | | 2.78 | 3000 | 4.44 |
| 236 | | | | | | | | | | | |
| DMA | SBI04874 | Lentilactobacillus | buchneri | | SBI01292 | Talaromyces | atroroseus | | 0.55 | 750 | 749.81 |
| 240 | | | | | | | | | | | |
| DMA | CS00008 | Lactobacillus | acidophilus | La-14 | CS00018 | Saccharomyces | boulardii | | 4.29 | 1125 | 5.57 |
| 242 | | | | | | | | | | | |
| DMA | SBI04874 | Lentilactobacillus | buchneri | | CS00001 | Bacillus | subtilis | DE111 | 1.29 | 25 | 13.93 |
| 245 | | | | | | | | | | | |
| DMA | CS00008 | Lactobacillus | acidophilus | La-14 | SBI00589 | Bacillus | axarquiensis | | 2.86 | 1.63 | 2.84 |
| 246 | | | | | | | | | | | |
| DMA | SBI04874 | Lentilactobacillus | buchneri | | SBI00589 | Bacillus | axarquiensis | | 0.57 | 12.5 | 11.54 |
| 248 | | | | | | | | | | | |
| DMA | CS00008 | Lactobacillus | acidophilus | La-14 | SBI01595 | Bacillus | amyloliquefaciens | | 6.67 | 1125 | 138.24 |
| 250 | | | | | | | | | | | |
| DMA | SBI01595 | Bacillus | amyloliquefaciens | | SBI04874 | Lentilactobacillus | buchneri | | 3625 | 0.5 | 3598.02 |
| 251 | | | | | | | | | | | |
| DMA | CS00008 | Lactobacillus | acidophilus | La-14 | SBI03602 | Bacillus | subtilis | | 5 | 10000 | 5716.43 |
| 252 | | | | | | | | | | | |
| DMA | CS00008 | Lactobacillus | acidophilus | La-14 | SBI04877 | Bacillus | amyloliquefaciens | | 5 | 26250 | 3092.65 |
| 253 | | | | | | | | | | | |
| DMA | SBI04877 | Bacillus | amyloliquefaciens | | SBI04874 | Lentilactobacillus | buchneri | | 1875 | 6.67 | 1861.09 |
| 254 | | | | | | | | | | | |
| DMA | SBI04932 | Galactomyces | geotrichum | | SBI00714 | Bacillus | subtilis | | 6 | 2 | 5.98 |
| 269 | | | | | | | | | | | |
| DMA | SBI05449 | Kluyveromyces | marxianus | | SBI00714 | Bacillus | subtilis | | 6 | 0.6 | 0.86 |
| 271 | | | | | | | | | | | |
| DMA | CS00001 | Bacillus | subtilis | DE111 | SBI04873 | Pediococcus | ethanolidurans | | 66666.67 | 1.71 | 30.27 |
| 275 | | | | | | | | | | | |
| DMA | SBI03602 | Bacillus | subtilis | | SBI04873 | Pediococcus | ethanolidurans | | 333.33 | 833.33 | 666.67 |
| 279 | | | | | | | | | | | |
| DMA | SBI04877 | Bacillus | amyloliquefaciens | | SBI04873 | Pediococcus | ethanolidurans | | 1333333.33 | 10 | 63501.59 |
| 280 | | | | | | | | | | | |
| DMA | SBI05449 | Kluyveromyces | marxianus | | SBI02181 | Bacillus | amyloliquefaciens | | 1750 | 0.9 | 7.87 |
| 282 | | | | | | | | | | | |
| DMA | SBI04932 | Galactomyces | geotrichum | | SBI02354 | Bacillus | pumilus | | 10000 | 1.5 | 9971.51 |
| 286 | | | | | | | | | | | |
| DMA | SBI05419 | Kazachstania | servazzii | | SBI02354 | Bacillus | pumilus | | 42.86 | 0.37 | 30.11 |
| 287 | | | | | | | | | | | |
| DMA | SBI05473 | Saccharomyces | cerevisiae | | SBI02354 | Bacillus | pumilus | | 42.86 | 1.67 | 9.46 |
| 295 | | | | | | | | | | | |
| DMA | SBI05469 | Nakazawaea | ishiwadae | | SBI00592 | Bacillus | mojavensis | | 8.33 | 3.33 | 7.68 |
| 296 | | | | | | | | | | | |
| DMA | SBI01681 | Candida | akabanensis | | SBI00693 | Bacillus | subtilis | | 6.67 | 0.45 | 6.45 |
| 297 | | | | | | | | | | | |
| DMA | SBI05469 | Nakazawaea | ishiwadae | | SBI02181 | Bacillus | amyloliquefaciens | | 15 | 0.89 | 5.23 |
| 301 | | | | | | | | | | | |
| DMA | SBI01681 | Candida | akabanensis | | SBI04006 | Bacillus | subtilis | | 46 | 0.36 | 14.63 |
| 306 | | | | | | | | | | | |
| DMA | SBI05469 | Nakazawaea | ishiwadae | | SBI04006 | Bacillus | subtilis | | 14 | 1.11 | 5.71 |
| 307 | | | | | | | | | | | |
| DMA | SBI05469 | Nakazawaea | ishiwadae | | CS00001 | Bacillus | subtilis | DE111 | 6.67 | 1 | 1.18 |
| 310 | | | | | | | | | | | |
| DMA | SBI00120 | Holtermanniella | takashimae | | CS00001 | Bacillus | subtilis | DE111 | 13.33 | 0.89 | 1.29 |
| 311 | | | | | | | | | | | |
| DMA | SBI05473 | Saccharomyces | cerevisiae | | CS00007 | Lactiplantibacillus | plantarum | 299V | 6.57 | 0.5 | 6.57 |
| 321 | | | | | | | | | | | |
| DMA | SBI05473 | Saccharomyces | cerevisiae | | SBI04889 | Lactiplantibacillus | plantarum | | 29 | 0.33 | 28.89 |
| 327 | | | | | | | | | | | |
| DMA | SBI05473 | Saccharomyces | cerevisiae | | SBS04260 | Lactiplantibacillus | plantarum | | 82 | 1 | 81.36 |
| 333 | | | | | | | | | | | |
| DMA | SBI05473 | Saccharomyces | cerevisiae | | SBI00598 | Bacillus | subtilis | | 71.43 | 0.5 | 11.06 |
| 341 | | | | | | | | | | | |
| DMA | SBI05449 | Kluyveromyces | marxianus | | SBI03602 | Bacillus | subtilis | | 166.67 | 0.8 | 1.3 |
| 349 | | | | | | | | | | | |
| DMA | SBI05449 | Kluyveromyces | marxianus | | SBI04006 | Bacillus | subtilis | | 26.67 | 0.8 | 1.55 |
| 353 | | | | | | | | | | | |
| DMA | SBI04932 | Galactomyces | geotrichum | | CS00001 | Bacillus | subtilis | DE111 | 300 | 1.5 | 101 |
| 355 | | | | | | | | | | | |
| DMA | SBI05449 | Kluyveromyces | marxianus | | CS00001 | Bacillus | subtilis | DE111 | 2000 | 0.5 | 0.7 |
| 356 | | | | | | | | | | | |
| DMA | SBI04932 | Galactomyces | geotrichum | | SBI04918 | Lactococcus | lactis | | 4.77 | 10 | 4.77 |
| 358 | | | | | | | | | | | |
| DMA | SBI05449 | Kluyveromyces | marxianus | | SBI04918 | Lactococcus | lactis | | 4.92 | 0.4 | 4.92 |
| 359 | | | | | | | | | | | |
| DMA | SBI04880 | Pediococcus | pentosaceus | | SBI05449 | Kluyveromyces | marxianus | | 0.5 | 27894.74 | 18276.03 |
| 363 | | | | | | | | | | | |
| DMA | CS00017 | Lacticaseibacillus | paracasei | Shirota | SBI05449 | Kluyveromyces | marxianus | | 0.6 | 266.67 | 258.08 |
| 364 | | | | | | | | | | | |
| DMA | SBI04880 | Pediococcus | pentosaceus | | CS00018 | Saccharomyces | boulardii | | 0.6 | 15263.16 | 10000.21 |
| 365 | | | | | | | | | | | |
| DMA | CS00017 | Lacticaseibacillus | paracasei | Shirota | CS00018 | Saccharomyces | boulardii | | 0.9 | 166.67 | 161.32 |
| 366 | | | | | | | | | | | |
| DMA | SBI00564 | Bacillus | subtilis | | SBI05473 | Saccharomyces | cerevisiae | | 3.33 | 0.27 | 1.29 |
| 370 | | | | | | | | | | | |
| DMA | SBI00120 | Kwoniella | shandongens | | SBI02181 | Bacillus | amyloliquefaciens | | 27.5 | 0.78 | 9 |
| 210 | | | | | | | | | | | |
| DMA | SBI01187 | Pichia | membranifaciens | | SBI02181 | Bacillus | amyloliquefaciens | | 75 | 0.6 | 6.11 |
| 166 | | | | | | | | | | | |
| DMA | SBI01595 | Bacillus | amyloliquefaciens | | SBI05473 | Saccharomyces | cerevisiae | | 4.67 | 0.6 | 1.54 |
| 373 | | | | | | | | | | | |

TABLE 6
Indole Production Additivity and Synergy
(0 = No indole production, 1 = Potential Indole production, 2 = Indole production,
3 = Robust indole production, 4 = Very Robust indole production)

| | | | | | | | | | | | Predic- | |
|---|---|---|---|---|---|---|---|---|---|---|---|---|
| | | | | | Strain | | | | | Strain | ted | Combin- |
| | | | | | #1 | | | | | #2 | Combin- | ation |
| DMA | Strain | | | Strain | Indole | Strain | | | Strain | Indole | ation | Final |
| # | #1 | Genus | Species | ID | Score | #2 | Genus | Species | ID | Score | Score | Score |
| DMA | SBI04887 | Lacticasei- | casei | | 0 | SBI02185 | Bacillus | licheniformis | | 1 | 1 | 3 |
| 51 | | bacillus | | | | | | | | | | |
| DMA | SBI04889 | Lactiplanti- | plantarum | | 0 | SBI02185 | Bacillus | licheniformis | | 1 | 1 | 3 |
| 52 | | bacillus | | | | | | | | | | |
| DMA | SBI04887 | Lacticasei- | casei | | 0 | SBI04173 | Bacillus | paralicheni- | | 1 | 1 | 3 |
| 53 | | bacillus | | | | | | formis | | | | |
| DMA | SBI04889 | Lactiplanti- | plantarum | | 0 | SBI04173 | Bacillus | paralicheni- | | 1 | 1 | 3 |
| 54 | | bacillus | | | | | | formis | | | | |
| DMA | SBI04902 | Pediococcus | pentosaceus | | 0 | SBI00553 | Bacillus | subtilis | | 1 | 1 | 3 |
| 100 | | | | | | | | | | | | |
| DMA | SBI05449 | Kluyveromyces | marxianus | | 0 | SBI03599 | Bacillus | endophyticus | | 2 | 2 | 3 |
| 128 | | | | | | | | | | | | |
| DMA | SBI00564 | Bacillus | subtilis | | 1 | SBI05419 | Kazachstania | servazzii | | 0 | 1 | 2 |
| 138 | | | | | | | | | | | | |
| DMA | SBI00564 | Bacillus | subtilis | | 1 | SBI05449 | Kluyvero- | marxianus | | 0 | 1 | 2 |
| 139 | | | | | | | myces | | | | | |
| DMA | SBI00564 | Bacillus | subtilis | | 1 | SBS04255 | Leuconostoc | mesenteroides | | 0 | 1 | 2 |
| 140 | | | | | | | | | | | | |
| DMA | SBI00564 | Bacillus | subtilis | | 1 | SBI04919 | Pediococcus | parvulus | | 0 | 1 | 2 |
| 142 | | | | | | | | | | | | |
| DMA | SBI00564 | Bacillus | subtilis | | 1 | SBI04900 | Leuconostoc | pseudo- | | 0 | 1 | 2 |
| 143 | | | | | | | | mesenteroides | | | | |
| DMA | SBI00564 | Bacillus | subtilis | | 1 | SBI05399 | Lentilacto- | plantarum | | 0 | 1 | 3 |
| 379 | | | | | | | bacillus | | | | | |
| DMA | SBI01595 | Bacillus | vallismortis | | 1 | SBI05419 | Kazachstania | servazzii | | 0 | 1 | 3 |
| 147 | | | | | | | | | | | | |
| DMA | SBI01595 | Bacillus | vallismortis | | 1 | SBI05469 | Nakazawaea | ishiwadae | | 0 | 1 | 2 |
| 149 | | | | | | | | | | | | |
| DMA | SBI01595 | Bacillus | vallismortis | | 1 | SBS02335 | Pediococcus | pentosaceus | | 0 | 1 | 2 |
| 150 | | | | | | | | | | | | |
| DMA | SBI01595 | Bacillus | vallismortis | | 1 | SBI04881 | Lentilacto- | buchneri | | 0 | 1 | 2 |
| 151 | | | | | | | bacillus | | | | | |
| DMA | SBI01595 | Bacillus | vallismortis | | 1 | SBI04919 | Pediococcus | parvulus | | 0 | 1 | 2 |
| 152 | | | | | | | | | | | | |
| DMA | SBI01595 | Bacillus | vallismortis | | 1 | SBI04900 | Leuconostoc | pseudomese | | 0 | 1 | 2 |
| 153 | | | | | | | | nteroides | | | | |
| DMA | SBI01679 | Candida | sp. | | 0 | SBI00592 | Bacillus | mojavensis | | 2 | 2 | 3 |
| 155 | | | | | | | | | | | | |
| DMA | SBI01683 | Pichia | fermentans | | 0 | SBI00592 | Bacillus | mojavensis | | 2 | 2 | 3 |
| 156 | | | | | | | | | | | | |
| DMA | SBS04263 | Pichia | kudriavzevii | | 0 | SBI00592 | Bacillus | mojavensis | | 2 | 2 | 3 |
| 157 | | | | | | | | | | | | |
| DMA | SBI01679 | Candida | sp. | | 0 | SBI00693 | Bacillus | subtilis | | 2 | 2 | 3 |
| 158 | | | | | | | | | | | | |
| DMA | SBI01683 | Pichia | fermentans | | 0 | SBI00693 | Bacillus | subtilis | | 2 | 2 | 3 |
| 159 | | | | | | | | | | | | |
| DMA | SBS04263 | Pichia | kudriavzevii | | 0 | SBI00693 | Bacillus | subtilis | | 2 | 2 | 3 |
| 160 | | | | | | | | | | | | |
| DMA | SBI01679 | Candida | sp. | | 0 | SBI00714 | Bacillus | subtilis | | 2 | 2 | 3 |
| 162 | | | | | | | | | | | | |
| DMA | SBI01683 | Pichia | fermentans | | 0 | SBI00714 | Bacillus | subtilis | | 2 | 2 | 3 |
| 163 | | | | | | | | | | | | |
| DMA | SBS04263 | Pichia | kudriavzevii | | 0 | SBI00714 | Bacillus | subtilis | | 2 | 2 | 3 |
| 165 | | | | | | | | | | | | |
| DMA | SBI01187 | Pichia | membranifaciens | | 2 | SBI02354 | Bacillus | pumilus | | 1 | 3 | 3 |
| 168 | | | | | | | | | | | | |
| DMA | SBI01292 | Talaromyces | atroroseus | | 0 | SBI02354 | Bacillus | pumilus | | 1 | 1 | 3 |
| 169 | | | | | | | | | | | | |
| DMA | SBI01679 | Candida | sp. | | 0 | SBI02354 | Bacillus | pumilus | | 1 | 1 | 2 |
| 170 | | | | | | | | | | | | |
| DMA | SBI01683 | Pichia | fermentans | | 0 | SBI02354 | Bacillus | pumilus | | 1 | 1 | 2 |
| 171 | | | | | | | | | | | | |
| DMA | SBI01187 | Pichia | membranifaciens | | 2 | SBI04006 | Bacillus | subtilis | | 2 | 4 | 3 |
| 179 | | | | | | | | | | | | |
| DMA | SBI04932 | Galactomyces | geotrichum | | 0 | SBI00592 | Bacillus | mojavensis | | 2 | 2 | 3 |
| 184 | | | | | | | | | | | | |
| DMA | SBI05419 | Kazachstania | servazzii | | 0 | SBI00592 | Bacillus | mojavensis | | 2 | 2 | 3 |
| 185 | | | | | | | | | | | | |
| DMA | SBI05449 | Kluyveromyces | marxianus | | 0 | SBI00592 | Bacillus | mojavensis | | 2 | 2 | 2 |
| 186 | | | | | | | | | | | | |
| DMA | SBI00264 | Clavispora | sp. | | 0 | SBI00592 | Bacillus | mojavensis | | 2 | 2 | 3 |
| 187 | | | | | | | | | | | | |
| DMA | SBS00319 | Debaryomyces | hansenii | | 0 | SBI00592 | Bacillus | mojavensis | | 2 | 2 | 3 |
| 188 | | | | | | | | | | | | |
| DMA | SBI03199 | Candida | dosseyi | | 0 | SBI00592 | Bacillus | mojavensis | | 2 | 2 | 3 |
| 189 | | | | | | | | | | | | |
| DMA | SBI05473 | Saccharomyces | cerevisiae | | 0 | SBI00592 | Bacillus | mojavensis | | 2 | 2 | 3 |
| 190 | | | | | | | | | | | | |
| DMA | SBI04932 | Galactomyces | geotrichum | | 0 | SBI00693 | Bacillus | subtilis | | 2 | 2 | 3 |
| 191 | | | | | | | | | | | | |
| DMA | SBI05419 | Kazachstania | servazzii | | 0 | SBI00693 | Bacillus | subtilis | | 2 | 2 | 3 |
| 192 | | | | | | | | | | | | |
| DMA | SBI05449 | Kluyveromyces | marxianus | | 0 | SBI00693 | Bacillus | subtilis | | 2 | 2 | 3 |
| 193 | | | | | | | | | | | | |
| DMA | SBI00264 | Clavispora | sp. | | 0 | SBI00693 | Bacillus | subtilis | | 2 | 2 | 3 |
| 194 | | | | | | | | | | | | |
| DMA | SBI03599 | Bacillus | endophyticus | | 2 | SBI04916 | Lactococcus | lactis | | 0 | 2 | 3 |
| 200 | | | | | | | | | | | | |
| DMA | SBS04260 | Lactiplanti- | plantarum | | 0 | SBI00592 | Bacillus | mojavensis | | 2 | 2 | 3 |
| 202 | | bacillus | | | | | | | | | | |
| DMA | SBS04260 | Lactiplanti- | plantarum | | 0 | SBI00693 | Bacillus | subtilis | | 2 | 2 | 3 |
| 203 | | bacillus | | | | | | | | | | |
| DMA | SBS04260 | Lactiplanti- | plantarum | | 0 | SBI04006 | Bacillus | subtilis | | 2 | 2 | 3 |
| 206 | | bacillus | | | | | | | | | | |
| DMA | SBI00120 | Holtermanniella | takashimae | | 0 | SBI00592 | Bacillus | mojavensis | | 2 | 2 | 3 |
| 207 | | | | | | | | | | | | |
| DMA | SBI00120 | Holtermanniella | takashimae | | 0 | SBI00693 | Bacillus | subtilis | | 2 | 2 | 3 |
| 208 | | | | | | | | | | | | |
| DMA | SBI00120 | Holtermanniella | takashimae | | 0 | SBI00714 | Bacillus | subtilis | | 2 | 2 | 3 |
| 209 | | | | | | | | | | | | |
| DMA | SBI01292 | Talaromyces | atroroseus | | 0 | SBI00592 | Bacillus | mojavensis | | 2 | 2 | 3 |
| 214 | | | | | | | | | | | | |
| DMA | SBI01292 | Talaromyces | atroroseus | | 0 | SBI00693 | Bacillus | subtilis | | 2 | 2 | 3 |
| 215 | | | | | | | | | | | | |
| DMA | SBI01292 | Talaromyces | atroroseus | | 0 | SBI00714 | Bacillus | subtilis | | 2 | 2 | 3 |
| 216 | | | | | | | | | | | | |
| DMA | SBI01292 | Talaromyces | atroroseus | | 0 | SBI04006 | Bacillus | subtilis | | 2 | 2 | 3 |
| 217 | | | | | | | | | | | | |
| DMA | SBI04259 | Weisella | cibaria | | 0 | SBI00592 | Bacillus | mojavensis | | 2 | 2 | 3 |
| 223 | | | | | | | | | | | | |
| DMA | SBI04259 | Weisella | cibaria | | 0 | SBI00714 | Bacillus | subtilis | | 2 | 2 | 3 |
| 224 | | | | | | | | | | | | |
| DMA | SBI03599 | Bacillus | endophyticus | | 2 | SBI04887 | Lacticasei- | casei | | 0 | 2 | 3 |
| 230 | | | | | | | bacillus | | | | | |
| DMA | SBI04006 | Bacillus | subtilis | | 2 | SBI04887 | Lacticasei- | casei | | 0 | 2 | 3 |
| 236 | | | | | | | bacillus | | | | | |
| DMA | CS00001 | Bacillus | subtilis | DE111 | 1 | SBI04874 | Lacticasei- | buchneri | | 0 | 1 | 2 |
| 245 | | | | | | | bacillus | | | | | |
| DMA | CS00008 | Lactobacillus | acidophilus | La-14 | 1 | SBI00589 | Bacillus | axarquiensis | | 1 | 2 | 2 |
| 246 | | | | | | | | | | | | |
| DMA | SBS04254 | Levilacto- | brevis | | 0 | SBI00589 | Bacillus | axarquiensis | | 1 | 1 | 2 |
| 247 | | bacillus | | | | | | | | | | |
| DMA | SBI04874 | Lentilacto- | buchneri | | 0 | SBI00589 | Bacillus | axarquiensis | | 1 | 1 | 2 |
| 248 | | bacillus | | | | | | | | | | |
| DMA | SBI01292 | Talaromyces | atroroseus | | 0 | SBI04877 | Bacillus | amylolique- | | 2 | 2 | 3 |
| 258 | | | | | | | | faciens | | | | |
| DMA | SBS00319 | Debaryomyces | hansenii | | 0 | SBI00693 | Bacillus | subtilis | | 2 | 2 | 3 |
| 266 | | | | | | | | | | | | |
| DMA | SBI03199 | Candida | dosseyi | | 0 | SBI00693 | Bacillus | subtilis | | 2 | 2 | 3 |
| 267 | | | | | | | | | | | | |
| DMA | SBI05473 | Saccharomyces | cerevisiae | | 0 | SBI00693 | Bacillus | subtilis | | 2 | 2 | 3 |
| 268 | | | | | | | | | | | | |
| DMA | SBI05419 | Kazachstania | servazzii | | 0 | SBI00714 | Bacillus | subtilis | | 2 | 2 | 3 |
| 270 | | | | | | | | | | | | |
| DMA | SBI05449 | Kluyveromyces | marxianus | | 0 | SBI00714 | Bacillus | subtilis | | 2 | 2 | 3 |
| 271 | | | | | | | | | | | | |
| DMA | SBI00264 | Clavispora | sp. | | 0 | SBI00714 | Bacillus | subtilis | | 2 | 2 | 3 |
| 272 | | | | | | | | | | | | |
| DMA | SBS00319 | Debaryomyces | hansenii | | 0 | SBI00714 | Bacillus | subtilis | | 2 | 2 | 3 |
| 273 | | | | | | | | | | | | |
| DMA | SBI04932 | Galactomyces | geotrichum | | 0 | SBI02354 | Bacillus | pumilus | | 1 | 1 | 2 |
| 286 | | | | | | | | | | | | |
| DMA | SBI05419 | Kazachstania | servazzii | | 0 | SBI02354 | Bacillus | pumilus | | 1 | 1 | 2 |
| 287 | | | | | | | | | | | | |
| DMA | SBI05449 | Kluyveromyces | marxianus | | 0 | SBI02354 | Bacillus | pumilus | | 1 | 1 | 2 |
| 288 | | | | | | | | | | | | |
| DMA | SBI00264 | Clavispora | sp. | | 0 | SBI02354 | Bacillus | pumilus | | 1 | 1 | 3 |
| 289 | | | | | | | | | | | | |
| DMA | SBI01681 | Candida | almanticensis | | 0 | SBI00592 | Bacillus | mojavensis | | 2 | 2 | 3 |
| 294 | | | | | | | | | | | | |
| DMA | SBI05469 | Nakazawaea | ishiwadae | | 0 | SBI00592 | Bacillus | mojavensis | | 2 | 2 | 3 |
| 296 | | | | | | | | | | | | |
| DMA | SBI01681 | Candida | almanticensis | | 0 | SBI00693 | Bacillus | subtilis | | 2 | 2 | 3 |
| 297 | | | | | | | | | | | | |
| DMA | SBI05469 | Nakazawaea | ishiwadae | | 0 | SBI00693 | Bacillus | subtilis | | 2 | 2 | 3 |
| 298 | | | | | | | | | | | | |
| DMA | SBI01681 | Candida | almanticensis | | 0 | SBI00714 | Bacillus | subtilis | | 2 | 2 | 3 |
| 299 | | | | | | | | | | | | |
| DMA | SBI05469 | Nakazawaea | ishiwadae | | 0 | SBI00714 | Bacillus | subtilis | | 2 | 2 | 3 |
| 300 | | | | | | | | | | | | |
| DMA | SBI01681 | Candida | almanticensis | | 0) | SBI03602 | Bacillus | subtilis | | 2 | 2 | 3 |
| 302 | | | | | | | | | | | | |
| DMA | SBI05469 | Nakazawaea | ishiwadae | | 0 | SBI03602 | Bacillus | subtilis | | 2 | 2 | 3 |
| 304 | | | | | | | | | | | | |
| DMA | SBI00120 | Holtermanniella | takashimae | | 0 | SBI03602 | Bacillus | subtilis | | 2 | 2 | 3 |
| 305 | | | | | | | | | | | | |
| DMA | SBI01681 | Candida | almanticensis | | 0 | CS00001 | Bacillus | subtilis | DE111 | 1 | 1 | 2 |
| 308 | | | | | | | | | | | | |
| DMA | SBI00264 | Clavispora | sp. | | 0 | SBI03599 | Bacillus | endophyticus | | 2 | 2 | 3 |
| 309 | | | | | | | | | | | | |
| DMA | SBS00319 | Debaryomyces | hansenii | | 0 | SBI03599 | Bacillus | endophyticus | | 2 | 2 | 3 |
| 313 | | | | | | | | | | | | |
| DMA | SBI01681 | Candida | almanticensis | | 0 | SBI05579 | Strepto- | thermophilus | | 0 | 0 | 1 |
| 317 | | | | | | | coccus | | | | | |
| DMA | SBS00319 | Debaryomyces | hansenii | | 0 | SBI05579 | Strepto- | thermophilus | | 0 | 0 | 1 |
| 319 | | | | | | | coccus | | | | | |
| DMA | SBI03199 | Candida | dosseyi | | 0 | SBI05579 | Strepto- | thermophilus | | 0 | 0 | 1 |
| 320 | | | | | | | coccus | | | | | |
| DMA | SBI01681 | Candida | almanticensis | | 0 | CS00008 | Lactobacillus | acidophilus | La-14 | 1 | 1 | 2 |
| 335 | | | | | | | | | | | | |
| DMA | SBS00208 | Pichia | terricola | | 0 | CS00008 | Lactobacillus | acidophilus | La-14 | 1 | 1 | 2 |
| 336 | | | | | | | | | | | | |
| DMA | SBS00319 | Debaryomyces | hansenii | | 0 | CS00008 | Lactobacillus | acidophilus | La-14 | 1 | 1 | 2 |
| 337 | | | | | | | | | | | | |
| DMA | SBI03199 | Candida | dosseyi | | 0 | CS00008 | Lactobacillus | acidophilus | La-14 | 1 | 1 | 2 |
| 338 | | | | | | | | | | | | |
| DMA | SBI04932 | Galactomyces | geotrichum | | 0 | SBI03602 | Bacillus | subtilis | | 2 | 2 | 3 |
| 343 | | | | | | | | | | | | |
| DMA | SBI05419 | Kazachstania | servazzii | | 0 | SBI03602 | Bacillus | subtilis | | 2 | 2 | 3 |
| 348 | | | | | | | | | | | | |
| DMA | SBI05449 | Kluyveromyces | marxianus | | 0 | SBI03602 | Bacillus | subtilis | | 2 | 2 | 3 |
| 349 | | | | | | | | | | | | |
| DMA | SBI00264 | Clavispora | sp. | | 0 | SBI03602 | Bacillus | subtilis | | 2 | 2 | 3 |
| 350 | | | | | | | | | | | | |
| DMA | SBS00319 | Debaryomyces | hansenii | | 0 | SBI03602 | Bacillus | subtilis | | 2 | 2 | 3 |
| 351 | | | | | | | | | | | | |
| DMA | SBI03199 | Candida | dosseyi | | 0 | SBI03602 | Bacillus | subtilis | | 2 | 2 | 3 |
| 352 | | | | | | | | | | | | |
| DMA | SBI00449 | Exiguo- | sp. | | 0 | SBI05473 | Saccharo- | cerevisiae | | 0 | 0 | 1 |
| 360 | | bacterium | | | | | myces | | | | | |
| DMA | SBI01595 | Bacillus | vallismortis | | 2 | SBI0817 | Pichia | membrani- | | 0 | 2 | 3 |
| 371 | | | | | | | | faciens | | | | |
| DMA | SBI01595 | Bacillus | vallismortis | | 2 | SBI04263 | Pichia | kudriavzevii | | 0 | 2 | 4 |
| 372 | | | | | | | | | | | | |
| DMA | SBI01595 | Bacillus | vallismortis | | 2 | SBI05473 | Saccharo- | cerevisiae | | 0 | 2 | 3 |
| 373 | | | | | | | myces | | | | | |
| DMA | SBI04011 | Bacillus | megaterium | | 2 | SBI05473 | Saccharo- | cerevisiae | | 0 | 2 | 3 |
| 376 | | | | | | | myces | | | | | |

TABLE 7
Acetate Additivity and Synergy in DMAs

| | | | | | Microbe | | | | | Microbe | Predic- | Combin- |
|---|---|---|---|---|---|---|---|---|---|---|---|---|
| | | | | | #1 | | | | | #2 | ted | ation |
| DMA | Microbe | | | Strain | Acetate | Microbe | | | Strain | Acetate | Acetate | Acetate |
| # | #1 | Genus | Species | ID | (uM) | #2 | Genus | Species | ID | (uM) | (uM) | (uM) |
| DMA | SBI04887 | Lacticasei- | casei | | 0 | SBI00817 | Pichia | fermentans | | 0 | 0 | 567 |
| 37 | | bacillus | | | | | | | | | | |
| DMA | SBI04887 | Lacticasei- | casei | | 0 | SBI01683 | Pichia | fermentans | | 0 | 0 | 376 |
| 40 | | bacillus | | | | | | | | | | |
| DMA | SBI04887 | Lacticasei- | casei | | 0 | SBS04263 | Pichia | kudriavzevii | | 0 | 0 | 679 |
| 43 | | bacillus | | | | | | | | | | |
| DMA | SBI04256 | Lacticasei- | casei | | 530 | SBI00550 | Bacillus | atrophaeus | | 112 | 642 | 1542 |
| 46 | | bacillus | | | | | | | | | | |
| DMA | SBI04256 | Lacticasei- | casei | | 530 | SBI02185 | Bacillus | licheniformis | | 92 | 622 | 799 |
| 50 | | bacillus | | | | | | | | | | |
| DMA | SBI04889 | Lactiplanti- | plantarum | | 646 | SBI02185 | Bacillus | licheniformis | | 92 | 738 | 852 |
| 52 | | bacillus | | | | | | | | | | |
| DMA | SBI00550 | Bacillus | atrophaeus | | 1355 | SBI00817 | Pichia | membranifaciens | | 0 | 1355 | 3587 |
| 56 | | | | | | | | | | | | |
| DMA | SBI02185 | Bacillus | licheniformis | | 4193 | SBI01683 | Pichia | fermentans | | 107 | 4300 | 4746 |
| 58 | | | | | | | | | | | | |
| DMA | SBI02185 | Bacillus | licheniformis | | 4193 | SBS04263 | Pichia | kudriavzevii | | 0 | 4193 | 4390 |
| 61 | | | | | | | | | | | | |
| DMA | SBI01819 | Bacillus | pumilus | | 70 | SBI04910 | Pediococcus | ethanolidurans | | 346 | 416 | 4313 |
| 64 | | | | | | | | | | | | |
| DMA | SBI00550 | Bacillus | atrophaeus | | 1355 | SBI04913 | Schleiferi- | harbinensis | | 715 | 2070 | 7802 |
| 69 | | | | | | | lactobacillus | | | | | |
| DMA | SBI03005 | Bacillus | altitudinis | | 1451 | SBI04918 | Lactococcus | lactis | | 7712 | 9162 | 10315 |
| 77 | | | | | | | | | | | | |
| DMA | SBI00550 | Bacillus | atrophaeus | | 1355 | SBI05697 | Lactiplanti- | plantarum | | 8944 | 10299 | 12112 |
| 78 | | | | | | | bacillus | | | | | |
| DMA | SBI00997 | Bacillus | safensis | | 1239 | SBI05697 | Lactiplanti- | plantarum | | 8944 | 10183 | 10225 |
| 79 | | | | | | | bacillus | | | | | |
| DMA | SBI01819 | Bacillus | pumilus | | 70 | SBI05697 | Lactiplanti- | plantarum | | 8944 | 9014 | 12172 |
| 80 | | | | | | | bacillus | | | | | |
| DMA | SBI02185 | Bacillus | licheniformis | | 4193 | SBI05697 | Lactiplanti- | plantarum | | 8944 | 13137 | 15836 |
| 81 | | | | | | | bacillus | | | | | |
| DMA | SBI04173 | Bacillus | paralicheni- | | 3996 | SBI05697 | Lactiplanti- | plantarum | | 8944 | 12940 | 15202 |
| 82 | | | formis | | | | bacillus | | | | | |
| DMA | SBI03005 | Bacillus | altitudinis | | 1451 | SBI05697 | Lactiplanti- | plantarum | | 8944 | 10395 | 11353 |
| 83 | | | | | | | bacillus | | | | | |
| DMA | SBI04877 | Bacillus | amylolique- | | 965 | SBI05697 | Lactiplanti- | plantarum | | 8944 | 9909 | 11583 |
| 84 | | | faciens | | | | bacillus | | | | | |
| DMA | SBI04874 | Lentilacto- | buchneri | | 463 | CS00018 | Saccharo- | boulardii | | 51 | 514 | 927 |
| 85 | | bacillus | | | | | myces | | | | | |
| DMA | SBI04874 | Lentilacto- | buchneri | | 463 | SBI05419 | Kazachstania | servazzii | | 41 | 504 | 551 |
| 86 | | bacillus | | | | | | | | | | |
| DMA | SBI04874 | Lentilacto- | buchneri | | 463 | SBI05449 | Kluyvero- | marxianus | | 0 | 463 | 780 |
| 87 | | bacillus | | | | | myces | | | | | |
| DMA | SBI04874 | Lentilacto- | buchneri | | 463 | SBI00553 | Bacillus | subtilis | | 285 | 748 | 848 |
| 88 | | bacillus | | | | | | | | | | |
| DMA | SBI04874 | Lentilacto- | buchneri | | 463 | SBI00449 | Exiguo- | sp. | | 2600 | 3063 | 3980 |
| 89 | | bacillus | | | | | bacterium | | | | | |
| DMA | SBI04874 | Lentilacto- | buchneri | | 463 | SBI00556 | Paenibacillus | sp. | | 5524 | 5987 | 6739 |
| 90 | | bacillus | | | | | | | | | | |
| DMA | SBI04874 | Lentilacto- | buchneri | | 463 | SBI00564 | Bacillus | subtilis | | 459 | 921 | 1088 |
| 91 | | bacillus | | | | | | | | | | |
| DMA | SBI04873 | Pediococcus | ethanoli- | | 34 | CS00018 | Saccharo- | boulardii | | 51 | 84 | 158 |
| 92 | | | durans | | | | myces | | | | | |
| DMA | SBI04873 | Pediococcus | ethanoli- | | 34 | SBI05449 | Kluyvero- | marxianus | | 0 | 34 | 276 |
| 93 | | | durans | | | | myces | | | | | |
| DMA | SBI04873 | Pediococcus | ethanoli- | | 34 | SBI00553 | Bacillus | subtilis | | 285 | 319 | 687 |
| 94 | | | durans | | | | | | | | | |
| DMA | SBI04873 | Pediococcus | ethanoli- | | 34 | SBI00564 | Bacillus | subtilis | | 459 | 492 | 628 |
| 97 | | | durans | | | | | | | | | |
| DMA | CS00010 | Lacticasei- | rhamnosus | Lr-32 | 2358 | CS00018 | Saccharo- | boulardii | | 0 | 2358 | 2983 |
| 98 | | bacillus | | | | | myces | | | | | |
| DMA | SBI04902 | Pediococcus | pentosaceus | | 759 | SBI00553 | Bacillus | subtilis | | 285 | 1045 | 6130 |
| 100 | | | | | | | | | | | | |
| DMA | SBI04910 | Pediococcus | ethanoli- | | 97 | CS00018 | Saccharo- | boulardii | | 51 | 148 | 429 |
| 101 | | | durans | | | | myces | | | | | |
| DMA | SBI04910 | Pediococcus | ethanoli- | | 97 | SBI05419 | Kazachstania | servazzii | | 41 | 138 | 327 |
| 102 | | | durans | | | | | | | | | |
| DMA | SBI04910 | Pediococcus | ethanoli- | | 97 | SBI05449 | Kluyvero- | marxianus | | 0 | 97 | 765 |
| 103 | | | durans | | | | myces | | | | | |
| DMA | SBI04910 | Pediococcus | ethanoli- | | 97 | SBI00553 | Bacillus | subtilis | | 285 | 382 | 568 |
| 104 | | | durans | | | | | | | | | |
| DMA | SBI04910 | Pediococcus | ethanoli- | | 97 | SBI00564 | Bacillus | subtilis | | 459 | 556 | 819 |
| 107 | | | durans | | | | | | | | | |
| DMA | SBI05697 | Lactiplanti- | plantarum | | 3372 | CS00018 | Saccharo- | boulardii | | 51 | 3423 | 4928 |
| 114 | | bacillus | | | | | myces | | | | | |
| DMA | SBI05697 | Lactiplanti- | plantarum | | 3372 | SBI01679 | Candida | sp. | | 0 | 3372 | 4949 |
| 115 | | bacillus | | | | | | | | | | |
| DMA | SBI05697 | Lactiplanti- | plantarum | | 3372 | SBI05419 | Kazachstania | servazzii | | 41 | 3413 | 3849 |
| 116 | | bacillus | | | | | | | | | | |
| DMA | SBI05697 | Lactiplanti- | plantarum | | 3372 | SBI05449 | Kluyvero- | marxianus | | 0 | 3372 | 5386 |
| 117 | | bacillus | | | | | myces | | | | | |
| DMA | SBI05697 | Lactiplanti- | plantarum | | 3372 | SBI05469 | Nakazawaea | ishiwadae | | 0 | 3372 | 3588 |
| 118 | | bacillus | | | | | | | | | | |
| DMA | SBI05697 | Lactiplanti- | plantarum | | 3372 | SBI00553 | Bacillus | subtilis | | 285 | 3657 | 5233 |
| 119 | | bacillus | | | | | | | | | | |
| DMA | SBI05697 | Lactiplanti- | plantarum | | 3372 | SBI00449 | Exiguo- | sp. | | 2600 | 5972 | 7881 |
| 120 | | bacillus | | | | | bacterium | | | | | |
| DMA | SBI05697 | Lactiplanti- | plantarum | | 3372 | SBI00556 | Paenibacillus | sp. | | 5524 | 8896 | 9760 |
| 121 | | bacillus | | | | | | | | | | |
| DMA | SBI05697 | Lactiplanti- | plantarum | | 3372 | SBI00564 | Bacillus | subtilis | | 459 | 3831 | 4804 |
| 122 | | bacillus | | | | | | | | | | |
| DMA | SBI05697 | Lactiplanti- | plantarum | | 3372 | SBI00568 | Psychro- | sp. | | 339 | 3711 | 4331 |
| 123 | | bacillus | | | | | bacillus | | | | | |
| DMA | SBI00553 | Bacillus | subtilis | | 611 | SBI05399 | Lactiplanti- | plantarum | | 5245 | 5856 | 6139 |
| 125 | | | | | | | bacillus | | | | | |
| DMA | SBI00449 | Exiguo- | sp. | | 5290 | SBS04255 | Leuconostoc | mesenteroides | | 1328 | 6618 | 8575 |
| 131 | | bacterium | | | | | | | | | | |
| DMA | SBI00556 | Paeni- | sp. | | 10294 | CS00018 | Saccharo- | boulardii | | 1210 | 11504 | 11498 |
| 134 | | bacillus | | | | | myces | | | | | |
| DMA | SBI00556 | Paeni- | sp. | | 10294 | SBI04881 | Lentilacto- | buchneri | | 911 | 11205 | 13851 |
| 137 | | bacillus | | | | | bacillus | | | | | |
| DMA | SBI00564 | Bacillus | subtilis | | 444 | SBI04900 | Leuconostoc | pseudo- | | 1933 | 2377 | 4783 |
| 143 | | | | | | | | mesenteroides | | | | |
| DMA | SBI00564 | Bacillus | subtilis | | 444 | SBI05399 | Lactiplanti- | plantarum | | 5245 | 5689 | 6499 |
| 379 | | | | | | | bacillus | | | | | |
| DMA | SBI00568 | Psychro- | sp. | | 59 | SBI05399 | Lactiplanti- | plantarum | | 5245 | 5304 | 5992 |
| 145 | | bacillus | | | | | bacillus | | | | | |
| DMA | SBI01595 | Bacillus | amylolique- | | 229 | CS00018 | Saccharo- | boulardii | | 0 | 229 | 593 |
| 146 | | | faciens | | | | myces | | | | | |
| DMA | SBI01595 | Bacillus | amylolique- | | 222 | SBI05399 | Lactiplanti- | plantarum | | 5245 | 5467 | 5599 |
| 154 | | | faciens | | | | bacillus | | | | | |
| DMA | SBI01187 | Pichia | membrani- | | 0 | SBI04006 | Bacillus | subtilis | | 0 | 0 | 637 |
| 179 | | | faciens | | | | | | | | | |
| DMA | SBI01679 | Candida | sp. | | 0 | SBI04006 | Bacillus | subtilis | | 0 | 0 | 977 |
| 180 | | | | | | | | | | | | |
| DMA | SBI01187 | Pichia | membrani- | | 0 | CS00001 | Bacillus | subtilis | DE111 | 4320 | 4320 | 5435 |
| 181 | | | faciens | | | | | | | | | |
| DMA | SBI01679 | Candida | sp. | | 0 | SBS04260 | Lactiplanti- | plantarum | | 3549 | 3549 | 3696 |
| 183 | | | | | | | bacillus | | | | | |
| DMA | SBI04916 | Lactococcus | lactis | | 6467 | SBI00120 | Holter- | takashimae | | 0 | 6467 | 6944 |
| 196 | | | | | | | manniella | | | | | |
| DMA | SBS04260 | Lactiplanti- | plantarum | | 1819 | SBI00120 | Holter- | takashimae | | 0 | 1819 | 2904 |
| 197 | | bacillus | | | | | manniella | | | | | |
| DMA | SBI01292 | Talaromyces | atroroseus | | 0 | SBI04918 | Lactococcus | lactis | | 6170 | 6170 | 6293 |
| 198 | | | | | | | | | | | | |
| DMA | SBI01292 | Talaromyces | atroroseus | | 0 | SBS04260 | Lactiplanti- | plantarum | | 3549 | 3549 | 4854 |
| 199 | | | | | | | bacillus | | | | | |
| DMA | SBS04260 | Lactiplanti- | plantarum | | 1819 | SBI03599 | Bacillus | endophyticus | | 10 | 1829 | 2169 |
| 201 | | bacillus | | | | | | | | | | |
| DMA | SBS04260 | Lactiplanti- | plantarum | | 1819 | SBI00592 | Bacillus | mojavensis | | 1009 | 2828 | 3391 |
| 202 | | bacillus | | | | | | | | | | |
| DMA | SBS04260 | Lactiplanti- | plantarum | | 1819 | SBI00693 | Bacillus | subtilis | | 1212 | 3032 | 3571 |
| 203 | | bacillus | | | | | | | | | | |
| DMA | SBS04260 | Lactiplanti- | plantarum | | 1819 | SBI00714 | Bacillus | subtilis | | 1680 | 3500 | 3883 |
| 204 | | bacillus | | | | | | | | | | |
| DMA | SBS04260 | Lactiplanti- | plantarum | | 1819 | SBI02181 | Bacillus | amyloliquefaciens | | 342 | 2161 | 2533 |
| 205 | | bacillus | | | | | | | | | | |
| DMA | SBS04260 | Lactiplanti- | plantarum | | 1819 | SBI04006 | Bacillus | subtilis | | 1704 | 3523 | 3608 |
| 206 | | bacillus | | | | | | | | | | |
| DMA | SBI01292 | Talaromyces | atroroseus | | 0 | SBI00714 | Bacillus | subtilis | | 1408 | 1408 | 2354 |
| 216 | | | | | | | | | | | | |
| DMA | SBI01292 | Talaromyces | atroroseus | | 0 | SBI04006 | Bacillus | subtilis | | 609 | 609 | 911 |
| 217 | | | | | | | | | | | | |
| DMA | SBI00714 | Bacillus | subtilis | | 842 | SBI04256 | Lacticasei- | casei | | 938 | 1779 | 1923 |
| 220 | | | | | | | bacillus | | | | | |
| DMA | SBI03599 | Bacillus | endophyticus | | 205 | SBI04887 | Lacticasei- | casei | | 467 | 672 | 667 |
| 230 | | | | | | | bacillus | | | | | |
| DMA | SBI00592 | Bacillus | mojavensis | | 896 | SBI04887 | Lacticasei- | casei | | 467 | 1363 | 1436 |
| 231 | | | | | | | bacillus | | | | | |
| DMA | SBI00693 | Bacillus | subtilis | | 881 | SBI04887 | Lacticasei- | casei | | 467 | 1348 | 1454 |
| 232 | | | | | | | bacillus | | | | | |
| DMA | SBI00714 | Bacillus | subtilis | | 842 | SBI04887 | Lacticasei- | casei | | 467 | 1309 | 1569 |
| 233 | | | | | | | bacillus | | | | | |
| DMA | SBI00461 | Bacillus | safensis | | 912 | SBI04887 | Lacticasei- | casei | | 467 | 1379 | 1591 |
| 237 | | | | | | | bacillus | | | | | |
| DMA | SBI04874 | Lentilacto- | buchneri | | 938 | SBI00225 | Clavispora | sp. | | 0 | 938 | 1041 |
| 238 | | bacillus | | | | | | | | | | |
| DMA | CS00008 | Lacto- | acidophilus | La-14 | 451 | SBI01292 | Talaromyces | atroroseus | | 0 | 451 | 670 |
| 239 | | bacillus | | | | | | | | | | |
| DMA | CS00010 | Lacticasei- | rhamnosus | Lr-32 | 2358 | SBI01292 | Talaromyces | atroroseus | | 0 | 2358 | 3124 |
| 241 | | bacillus | | | | | | | | | | |
| DMA | SBS04254 | Levilacto- | brevis | | 1198 | CS00018 | Saccharo- | boulardii | | 0 | 1198 | 1372 |
| 243 | | bacillus | | | | | myces | | | | | |
| DMA | SBI05579 | Strepto- | thermo- | | 5194 | SBI03599 | Bacillus | endophytic | | 299 | 5493 | 5642 |
| 244 | | coccus | philus | | | | | us | | | | |
| DMA | SBI00598 | Bacillus | subtilis | | 1853 | SBI04874 | Lentilacto- | buchneri | | 1978 | 3831 | 3848 |
| 249 | | | | | | | bacillus | | | | | |
| DMA | CS00008 | Lacto- | acidophilus | La-14 | 451 | SBI01595 | Bacillus | amyloliquefaciens | | 0 | 451 | 618 |
| 250 | | bacillus | | | | | | | | | | |
| DMA | CS00008 | Lacto- | acidophilus | La-14 | 451 | SBI03602 | Bacillus | subtilis | | 591 | 1042 | 1251 |
| 252 | | bacillus | | | | | | | | | | |
| DMA | CS00008 | Lacto- | acidophilus | La-14 | 451 | SBI04877 | Bacillus | amyloliquefaciens | | 197 | 648 | 1114 |
| 253 | | bacillus | | | | | | | | | | |
| DMA | CS00007 | Lactiplanti- | plantarum | 299V | 6247 | SBI00461 | Bacillus | safensis | | 373 | 6621 | 6724 |
| 255 | | bacillus | | | | | | | | | | |
| DMA | SBI01292 | Talaromyces | atroroseus | | 0 | CS00001 | Bacillus | subtilis | DE111 | 4320 | 4320 | 5064 |
| 256 | | | | | | | | | | | | |
| DMA | SBI04877 | Bacillus | amylolique- | | 327 | SBI01292 | Talaromyces | atroroseus | | 0 | 327 | 460 |
| 258 | | | faciens | | | | | | | | | |
| DMA | CS00001 | Bacillus | subtilis | DE111 | 1927 | CS00018 | Saccharo- | boulardii | | 0 | 1927 | 2611 |
| 260 | | | | | | | myces | | | | | |
| DMA | SBI00589 | Bacillus | axarquiensis | | 2056 | CS00018 | Saccharo- | boulardii | | 0 | 2056 | 2519 |
| 261 | | | | | | | myces | | | | | |
| DMA | SBI00598 | Bacillus | subtilis | | 1853 | CS00018 | Saccharo- | boulardii | | 0 | 1853 | 2090 |
| 262 | | | | | | | myces | | | | | |
| DMA | SBI04877 | Bacillus | amylolique- | | 327 | CS00018 | Saccharo- | boulardii | | 0 | 327 | 994 |
| 263 | | | faciens | | | | myces | | | | | |
| DMA | SBI00644 | Bacillus | aryabhattai | | 1325 | CS00018 | Saccharo- | boulardii | | 0 | 1325 | 1982 |
| 264 | | | | | | | myces | | | | | |
| DMA | SBI05473 | Saccharo- | cerevisiae | | 711 | SBI04916 | Lactococcus | lactis | | 1280 | 1991 | 2491 |
| 265 | | myces | | | | | | | | | | |
| DMA | SBI03199 | Candida | dosseyi | | 911 | SBI00714 | Bacillus | subtilis | | 1823 | 2734 | 3128 |
| 274 | | | | | | | | | | | | |
| DMA | CS00001 | Bacillus | subtilis | DE111 | 1927 | SBI04873 | Pediococcus | ethanolidurans | | 0 | 1927 | 2403 |
| 275 | | | | | | | | | | | | |
| DMA | SBI00598 | Bacillus | subtilis | | 1853 | SBI04873 | Pediococcus | ethanolidurans | | 0) | 1853 | 3356 |
| 277 | | | | | | | | | | | | |
| DMA | SBI03199 | Candida | dosseyi | | 911 | SBI02181 | Bacillus | amyloliquefaciens | | 487 | 1398 | 4331 |
| 283 | | | | | | | | | | | | |
| DMA | SBI05473 | Saccharo- | cerevisiae | | 420 | SBI02181 | Bacillus | amyloliquefaciens | | 487 | 906 | 2599 |
| 284 | | myces | | | | | | | | | | |
| DMA | SBI00644 | Bacillus | aryabhattai | | 1325 | SBI04874 | Lentilacto- | buchneri | | 1978 | 3303 | 3864 |
| 285 | | | | | | | bacillus | | | | | |
| DMA | SBS00319 | Debaryo- | hansenii | | 0 | SBI02354 | Bacillus | pumilus | | 3702 | 3702 | 5026 |
| 290 | | myces | | | | | | | | | | |
| DMA | SBI03199 | Candida | dosseyi | | 911 | SBI02354 | Bacillus | pumilus | | 3702 | 4613 | 5294 |
| 291 | | | | | | | | | | | | |
| DMA | SBI01681 | Candida | akabanensis | | 258 | SBI05579 | Strepto- | thermophilus | | 6720 | 6978 | 7254 |
| 317 | | | | | | | coccus | | | | | |
| DMA | SBS00319 | Debaryo- | hansenii | | 300 | SBI05579 | Strepto- | thermophilus | | 6720 | 7020 | 7169 |
| 319 | | myces | | | | | coccus | | | | | |
| DMA | SBI03199 | Candida | dosseyi | | 364 | SBI05579 | Strepto- | thermophilus | | 6720 | 7083 | 7090 |
| 320 | | | | | | | coccus | | | | | |
| DMA | SBI01681 | Candida | akabanensis | | 258 | CS00007 | Lactiplanti | plantarum | 299V | 6417 | 6674 | 7425 |
| 322 | | | | | | | bacillus | | | | | |
| DMA | SBS00208 | Pichia | terricola | | −125 | CS00007 | Lactiplanti | plantarum | 299V | 6417 | 6292 | 8121 |
| 323 | | | | | | | bacillus | | | | | |
| DMA | SBS00319 | Debaryo- | hansenii | | 300 | CS00007 | Lactiplanti | plantarum | 299V | 6417 | 6717 | 6961 |
| 324 | | myces | | | | | bacillus | | | | | |
| DMA | SBI03199 | Candida | dosseyi | | 364 | CS00007 | Lactiplanti | plantarum | 299V | 6417 | 6780 | 7442 |
| 325 | | | | | | | bacillus | | | | | |
| DMA | SBI05473 | Saccharo- | cerevisiae | | 711 | SBI04918 | Lactococcus | lactis | | 4099 | 4810 | 5184 |
| 326 | | myces | | | | | | | | | | |
| DMA | SBI01681 | Candida | akabanensis | | 258 | SBI04889 | Lactiplanti- | plantarum | | 5799 | 6057 | 6183 |
| 328 | | | | | | | bacillus | | | | | |
| DMA | SBI03199 | Candida | dosseyi | | 364 | SBI04889 | Lactiplanti- | plantarum | | 5799 | 6163 | 6778 |
| 329 | | | | | | | bacillus | | | | | |
| DMA | SBI05473 | Saccharo- | cerevisiae | | 711 | SBI04895 | Lacticasei- | casei | | 4065 | 4776 | 5186 |
| 330 | | myces | | | | | bacillus | | | | | |
| DMA | SBI01681 | Candida | akabanensis | | 258 | SBI04895 | Lacticasei- | casei | | 4065 | 4323 | 4414 |
| 331 | | | | | | | bacillus | | | | | |
| DMA | SBI03199 | Candida | dosseyi | | 364 | SBI04895 | Lacticasei- | casei | | 4065 | 4429 | 4501 |
| 332 | | | | | | | bacillus | | | | | |
| DMA | SBI01681 | Candida | akabanensis | | 258 | SBS04260 | Lactiplanti- | plantarum | | 5767 | 6025 | 6569 |
| 334 | | | | | | | bacillus | | | | | |
| DMA | SBI01681 | Candida | akabanensis | | 258 | SBI04916 | Lactococcus | lactis | | 1280 | 1538 | 2198 |
| 339 | | | | | | | | | | | | |
| DMA | SBI03199 | Candida | dosseyi | | 364 | SBI04916 | Lactococcus | lactis | | 1280 | 1644 | 1813 |
| 340 | | | | | | | | | | | | |
| DMA | SBI05473 | Saccharo- | cerevisiae | | 711 | SBI00598 | Bacillus | subtilis | | 729 | 1440 | 1495 |
| 341 | | myces | | | | | | | | | | |
| DMA | SBI01681 | Candida | akabanensis | | 258 | SBI00598 | Bacillus | subtilis | | 729 | 987 | 1044 |
| 342 | | | | | | | | | | | | |
| DMA | SBS00319 | Debaryo- | hansenii | | 300 | SBI00598 | Bacillus | subtilis | | 729 | 1029 | 7426 |
| 344 | | myces | | | | | | | | | | |
| DMA | SBI03199 | Candida | dosseyi | | 364 | SBI00598 | Bacillus | subtilis | | 729 | 1093 | 1510 |
| 345 | | | | | | | | | | | | |
| DMA | SBI05473 | Saccharo- | cerevisiae | | 711 | SBI00644 | Bacillus | aryabhattai | | 501 | 1212 | 1281 |
| 346 | | myces | | | | | | | | | | |
| DMA | SBI05419 | Kazachstania | servazzii | | 1098 | SBI03602 | Bacillus | subtilis | | 1744 | 2842 | 2849 |
| 348 | | | | | | | | | | | | |
| DMA | SBI03199 | Candida | dosseyi | | 911 | SBI04006 | Bacillus | subtilis | | 3965 | 4877 | 5854 |
| 354 | | | | | | | | | | | | |
| DMA | SBI03199 | Candida | dosseyi | | 911 | CS00001 | Bacillus | subtilis | DE111 | 5950 | 6861 | 6960 |
| 357 | | | | | | | | | | | | |
| DMA | SBI00449 | Exiguo- | sp. | | 4296 | SBI05473 | Saccharo- | cerevisiae | | 549 | 4845 | 4979 |
| 360 | | bacterium | | | | | myces | | | | | |
| DMA | CS00017 | Lacticasei- | paracasei | Shirota | 3128 | SBI00564 | Bacillus | subtilis | | 252 | 3380 | 3388 |
| 361 | | bacillus | | | | | | | | | | |
| DMA | CS00017 | Lacticasei- | paracasei | Shirota | 3128 | SBI01595 | Bacillus | amyloliquefaciens | | 0 | 3128 | 3229 |
| 362 | | bacillus | | | | | | | | | | |
| DMA | CS00017 | Lacticasei- | paracasei | Shirota | 3128 | SBI05449 | Kluyvero- | marxianus | | 401 | 3528 | 3800 |
| 364 | | bacillus | | | | | myces | | | | | |
| DMA | CS00017 | Lacticasei- | paracasei | Shirota | 3128 | CS00018 | Saccharo- | boulardii | | 703 | 3830 | 4281 |
| 366 | | bacillus | | | | | myces | | | | | |
| DMA | SBI00553 | Bacillus | subtilis | | 75 | SBI00817 | Pichia | fermentans | | 254 | 329 | 399 |
| 369 | | | | | | | | | | | | |
| DMA | SBI01595 | Bacillus | amylolique- | | 0 | SBI00817 | Pichia | fermentans | | 254 | 254 | 418 |
| 371 | | | faciens | | | | | | | | | |
| DMA | SBI04011 | Bacillus | megaterium | | 0 | SBI00817 | Pichia | fermentans | | 254 | 254 | 299 |
| 375 | | | | | | | | | | | | |
| DMA | CS00020 | Weizmannia | coagulans | BC30 | 1261 | SBI00817 | Pichia | fermentans | | 254 | 1515 | 1752 |
| 377 | | | | | | | | | | | | |
| DMA | CS00020 | Weizmannia | coagulans | BC30 | 1261 | SBI05473 | Saccharo- | cerevisiae | | 549 | 1810 | 2215 |
| 378 | | | | | | | myces | | | | | |
| DMA | SBI05579 | Strepto- | thermophilus | | 5194 | SBI03602 | Bacillus | subtilis | | 462 | 5657 | 8004 |
| 380 | | coccus | | | | | | | | | | |
| DMA | SBI04259 | Weisella | cibaria | | 3105 | SBI03602 | Bacillus | subtilis | | 462 | 3567 | 4718 |
| 381 | | | | | | | | | | | | |

TABLE 8
Propionate Additivity and Synergy in DMAs

| | | | | | Microbe | | | | | Microbe | Predicted | |
|---|---|---|---|---|---|---|---|---|---|---|---|---|
| | | | | | #1 | | | | | #2 | Combi- | Actual |
| | | | | | Prop- | | | | | Propi- | nation | Propi- |
| DMA | Microbe | | | Strain | ionate | Microbe | | | Strain | onate | Propionate | onate |
| # | #1 | Genus | Species | ID | (uM) | #2 | Genus | Species | ID | (uM) | (uM) | (uM) |
| DMA | SBI00550 | Bacillus | atrophae | | 101 | SBI00817 | Pichia | fermentans | | 0 | 101 | 459 |
| 56 | | | | | | | | | | | | |
| DMA | SBI04173 | Bacillus | paralicheni- | | 304 | SBI01187 | Pichia | membranifaciens | | 0 | 304 | 422 |
| 57 | | | formis | | | | | | | | | |
| DMA | SBI04173 | Bacillus | paralicheni- | | 304 | SBI02945 | Meyerozyma | guilliermondii | | 0 | 304 | 38 |
| 59 | | | formis | | | | | | | | | |
| DMA | SBI04173 | Bacillus | paralicheni- | | 304 | SBS04263 | Pichia | kudriavzevii | | 0 | 304 | 320 |
| 62 | | | formis | | | | | | | | | |
| DMA | SBI01819 | Bacillus | pumilus | | 0 | SBI04910 | Pediococcus | ethanolidurans | | 0 | 0 | 518 |
| 64 | | | | | | | | | | | | |
| DMA | SBI00553 | Bacillus | subtilis | | 0 | SBI04902 | Pediococcus | pentosaceus | | 0 | 0 | 364 |
| 100 | | | | | | | | | | | | |
| DMA | SBI00556 | Paeni- | sp. | | 16 | SBI05449 | Kluyveros- | marxianus | | 0 | 16 | 262 |
| 135 | | bacillus | | | | | myces | | | | | |
| DMA | SBI01595 | Bacillus | amylolique- | | 50 | CS00018 | Saccharo- | boulardii | | 0 | 50 | 447 |
| 146 | | | faciens | | | | myces | | | | | |
| DMA | SBI03602 | Bacillus | subtilis | | 67 | SBI01187 | Pichia | membranifaciens | | 295 | 361 | 1157 |
| 178 | | | | | | | | | | | | |
| DMA | SBI04006 | Bacillus | subtilis | DE111 | 0 | SBI01187 | Pichia | membranifaciens | | 295 | 295 | 2469 |
| 179 | | | | | | | | | | | | |
| DMA | CS00001 | Bacillus | subtilis | DE111 | 0 | SBI01187 | Pichia | membranifaciens | | 295 | 295 | 4893 |
| 181 | | | | | | | | | | | | |
| DMA | SBI00592 | Bacillus | mojavensis | | 0 | SBI00120 | Kwoniella | shandongens | | 0 | 0 | 270 |
| 207 | | | | | | | | | | | | |
| DMA | SBI00714 | Bacillus | subtilis | | 0 | SBI00120 | Kwoniella | shandongens | | 0 | 0 | 280 |
| 209 | | | | | | | | | | | | |
| DMA | SBI00693 | Bacillus | subtilis | | 233 | SBI04256 | Lacticasei- | casei | | 303 | 536 | 580 |
| 219 | | | | | | | bacillus | | | | | |
| DMA | SBI00714 | Bacillus | subtilis | | 0 | SBI04256 | Lacticasei- | casei | | 303 | 303 | 622 |
| 220 | | | | | | | bacillus | | | | | |
| DMA | SBI04006 | Bacillus | subtilis | | 108 | SBI04256 | Lacticasei- | casei | | 303 | 411 | 518 |
| 221 | | | | | | | bacillus | | | | | |
| DMA | SBI00461 | Bacillus | safensis | | 295 | SBI04256 | Lacticasei- | casei | | 303 | 598 | 765 |
| 222 | | | | | | | bacillus | | | | | |
| DMA | SBI00714 | Bacillus | subtilis | | 0 | SBI04881 | Lentilacto- | buchneri | | 447 | 447 | 596 |
| 225 | | | | | | | bacillus | | | | | |
| DMA | SBI04006 | Bacillus | subtilis | | 108 | SBI04881 | Lentilacto- | buchneri | | 447 | 555 | 621 |
| 226 | | | | | | | bacillus | | | | | |
| DMA | SBI04006 | Bacillus | subtilis | | 108 | SBI04884 | Enterococcus | gilvus | | 1616 | 1724 | 1741 |
| 228 | | | | | | | | | | | | |
| DMA | SBI03599 | Bacillus | endophyticus | | 66 | SBI04887 | Lacticasei- | casei | | 151 | 217 | 216 |
| 230 | | | | | | | bacillus | | | | | |
| DMA | SBI00592 | Bacillus | mojavensis | | 313 | SBI04887 | Lacticasei- | casei | | 151 | 464 | 464 |
| 231 | | | | | | | bacillus | | | | | |
| DMA | SBI00693 | Bacillus | subtilis | | 233 | SBI04887 | Lacticasei- | casei | | 151 | 384 | 470 |
| 232 | | | | | | | bacillus | | | | | |
| DMA | SBI00714 | Bacillus | subtilis | | 0 | SBI04887 | Lacticasei- | casei | | 151 | 151 | 507 |
| 233 | | | | | | | bacillus | | | | | |
| DMA | SBI04006 | Bacillus | subtilis | | 108 | SBI04887 | Lacticasei- | casei | | 151 | 259 | 451 |
| 236 | | | | | | | bacillus | | | | | |
| DMA | SBI00461 | Bacillus | safensis | | 295 | SBI04887 | Lacticasei- | casei | | 151 | 446 | 514 |
| 237 | | | | | | | bacillus | | | | | |
| DMA | SBI01595 | Bacillus | amylolique- | | 268 | SBI04874 | Lentilacto- | buchneri | | 0 | 268 | 440 |
| 251 | | | faciens | | | | bacillus | | | | | |
| DMA | SBI04877 | Bacillus | amylolique- | | 222 | CS00008 | Lacto- | acidophilus | La-14 | 0 | 222 | 276 |
| 253 | | | faciens | | | | bacillus | | | | | |
| DMA | SBI04877 | Bacillus | amylolique- | | 222 | SBI04874 | Lentilacto- | buchneri | | 0 | 222 | 428 |
| 254 | | | faciens | | | | bacillus | | | | | |
| DMA | SBI01595 | Bacillus | amylolique- | | 427 | SBI04873 | Pediococcus | ethanolidurans | | 0 | 427 | 452 |
| 278 | | | faciens | | | | | | | | | |
| DMA | SBI00598 | Bacillus | subtilis | | 88 | SBS00319 | Debaryo- | hansenii | | 0 | 88 | 355 |
| 344 | | | | | | | myces | | | | | |

### Example 9: In Vitro Testing of DMAs for Effects on Human Cells

[0347] Following the in silico identification of DMAs with therapeutic potential, the desired phenotypes are confirmed experimentally using human cell culture techniques. Individual microbes are grown in pure culture and then combined at equal proportions to test the effects of the resulting combination (DMA) on human cells utilizing several culture-based assays.

[0348] To empirically test the immunomodulatory capacity of DMAs in vitro, mammalian immune cells are treated with microbially conditioned supernatant. Human U937 cells are myelocyte lineage cells which can be differentiated into macrophage-like cells with ionophores, such as phorbol 12-myristate 13-acetate (PMA). PMA differentiated U937 macrophages are incubated with microbially conditioned supernatant. The subsequent immune response is analyzed by enzyme-linked immunosorbent assay (ELISA) and/or qRT-PCR to quantify the specific cytokines including but not limited to TNF-α, IL-1β, IL-2, IL-3, IL-4, IL-5, IL-6, IL-7, IL-8, IL-9, IL-10, IL-12, IL-13, IL-15, IL-17, IL-21, IL-22, IL-23, IL-27 IFNγ, G-CSF, GM-CSF, IP-10, CXCL-1, CXCL-2, LIF, LIX, MCP-1 that are produced in response to the microbial supernatant. Through examination of the pro- and anti-inflammatory cytokines that are produced by these immune cells, the effect of the microbes of interest on the immune system is discerned.

[0349] Specific immunomodulatory pathways are also examined. The aryl hydrocarbon receptor (AHR) is receptor found on epithelial cells of the gastrointestinal tract that is known to induce anti-inflammatory immune signaling in response to indole derivatives and other microbial metabolites (Postler et al., 2017). Utilizing an AHR reporter system activation of this signaling pathway is examined as previously described (Marinelli et al., 2018). Microbially conditioned supernatant is then incubated with HT29 human cells containing an AHR luciferase reporter system, wherein the luciferase gene is under the control of an AHR controlled promoter. Supernatant that stimulates AHR signaling induces expression of the luciferase reporter gene. Luciferase activity is measured spectroscopically to quantify AHR signaling induced by the supernatant.

[0350] Other immunomodulatory pathways that are examined are the Toll-Like Receptor (TLR) pathways. TLRs are immunological receptors that detect specific microbial molecular patterns. In response to stimulation by their ligands, these receptors can promote pro- and anti-inflammatory responses. Of specific interest are the TLR heterodimers TLR1/TLR2 and TLR2/TLR6 and the homodimers TLR4 and TLR5. It has been shown that the TLR2-based heterodimers can induce the production of the anti-inflammatory cytokine, IL-10, upon binding to microbial cell wall components (Cario E, 2004; Jang S, 2004; Saraiva M, 2010; Nguyen, 2020). Additionally, while TLR4 and TLR5 are often thought of as pro-inflammatory receptors, studies have indicated that TLR4 activation can lead to secretion of IL-10 resulting in the maturation of regulatory T cells to control the inflammatory response (Higgins S, 2003). Furthermore, TLR5 signaling is critical for maintenance of the epithelial barrier within the gastrointestinal tract. TLR5 activation by commensal bacteria has been shown to inhibit general inflammation within the gut. The loss of TLR5 expression from intestinal epithelial cells has been shown to increase inflammation and epithelial permeability within the gastrointestinal tract (Vijay-Kumar et al., 2007, Chassaing et al., 2015). Reporter cell lines, such as the HEK-Blue TLR5 reporter line are used to demonstrate TLR signaling in response to microbial ligands. Microbes are grown in pure culture. These microbes or microbially conditioned supernatant are used to treat human cells that contain a reporter gene has been placed under the control of a TLR controlled reporter. When the TLR becomes activated by a microbe or secreted microbial compound, the reporter gene is expressed producing a measurable result.

### Example 10: Altered Cytokine Responses from DMA-Treated Peripheral Blood Mononuclear Cells with and without Inflammatory Stimulation In Vitro

[0351] Microbial metabolites and components are known to influence immune cells, shaping immune responses through interactions with various cell types and secreted molecules like cytokines and chemokines. Given the complexity of immune responses, in vitro model systems are essential for studying immune cell functions. Peripheral blood mononuclear cells (PBMCs)—which include T cells, B cells, dendritic cells, NK cells, and monocytes—offer a versatile model for examining comprehensive immune responses, as they represent a diverse array of immune cells relevant to human immunity (Klieveland 2015). Aging, and menopause in particular, can lead to enhanced inflammatory signaling, which has been demonstrated in PBMCs isolated from post-menopausal women (Rachon et al., 2002; Paik et al., 2012).

[0352] To examine the influence of DMAs on immune cells in vitro, cryopreserved human PBMCs were procured or fresh human PBMCs were isolated from whole blood. These cells were treated with media controls, lipopolysaccharide (LPS, a stimulatory control), or a defined microbial assemblage (DMA) at varying multiplicities of interaction (MOI), the number of microbes applied per individual human cell). Cells were then incubated with their individual treatment conditions for 24 hours (Hua et al., 2010). Human cells and microbes were removed from solutions by centrifugation and cell viability was determined by secreted lactate dehydrogenase activity. PBMCs were treated with either DMAs at MOIs of 1 and 10, and cytokine secretion was examined via enzyme-linked immunosorbent assay (ELISA) to characterize the immune responses elicited by different DMAs. Quantified cytokines and chemokines included: interferon γ (IFNγ), transforming growth factor β (TGFβ), tumor necrosis factor α (TNFα), osteoprotegerin (OPG), CXCL-1, and interleukins (IL)-10, -12, -1β, -23, -6, -18, and -8 (Bartelt et al., 2009; Schildberger et al., 2013).

### Example 11: Examination of Barrier Integrity and Immune Response of Intestinal Epithelial Monolayers Treated with DMAs In Vitro

[0353] The intestinal epithelium is considered an active participant in host defense. It forms a physical barrier that segregates the host from potentially noxious luminal microbes and compounds but is also capable of secreting cytokines to recruit immune cells. The intestinal barrier contains an essential component of intercellular junction complexes, known as tight junctions. They are composed of junction proteins, such as occludin and claudin, that control the permeability of molecules in adjacent cells (Paradis et al., 2021). Complex interactions between the epithelial cells, mucus layer, and immune cells regulate the function of the intestinal barrier. When there is a disruption to these interactions, barrier dysfunction can occur. Certain probiotics such as Saccharomyces boulardii have been shown to improve barrier function (Czerucka et al., 2007). We sought to determine whether DMAs were capable of modulating intestinal barrier integrity and cytokine signaling. We investigated the capability of DMAs to modulate intestinal barrier integrity and influence cytokine signaling pathways.

[0354] Briefly, Caco-2 and HT-29 human epithelial cells were seeded in a 7:3 ratio on semipermeable membrane supports to generate a differentiated, polarized, epithelial monolayer. Cells were cultured in DMEM medium containing 10% FBS, 1 mM Glutamine, and 1× Anti-Anti (Gibco) at 37° C., 5% CO₂ for approximately 18 days to allow for tight junction formation. During this time, barrier integrity measurements were taken at regular intervals using transepithelial electrical resistance (TEER) (Srinivasan et al., 2015). Cells were then treated with a DMA at varying MOIs, E. coli, or media controls and co-incubated for 16-24 hours and TEER was again measured. Cells and microbes were removed from solutions by centrifugation. Cytokines (IL-8 and CXCL-1) were quantified by ELISA to determine how DMAs influenced immune responses.

### Example 12: Preclinical Validation of DMA Efficacy in Animal Models of Disease Aged Mice (Inflammaging)

[0355] DMAs are evaluated for their therapeutic efficacy in a mouse model of aging-associated inflammation. All mice are group housed with 5 mice per cage in individually ventilated cages (IVCs) specifically designed for germ free husbandry. After an acclimation period, baseline samples of feces and blood are collected, and baseline measures of body mass are recorded. After baseline measures are recorded, 18-month-old C57bl/6J male and female are randomly divided into groups and administered by bi-daily oral gavage of water (negative control), or one of five test DMAs for a period of 6-weeks. Bi-weekly fecal samples are collected to monitor the functional and taxonomic composition of the gut microbiome over time. 1-week prior to sacrifice, fasted animals receive an oral gavage of FITC-dextran, and a blood sample will be collected 4-hours later to measure gut permeability. After the 6-week administration period, tissues are collected from each mouse for downstream analysis as follows.

[0356] Metagenomic analysis of fecal pellets: DNA from the fecal pellets are extracted and the concentration are estimated. DNA libraries are prepared and an equimolar volume of each library will be pooled and sequenced. Raw sequencing reads are processed. Mouse DNA removal from the metagenomes is performed by mapping reads to the mouse reference genome GRCm38p6.

[0357] Taxonomic classification of the short-read metagenomes are based on marker genes identified using MetaPhlAn2 (Segata et al., 2012), and organism abundances are calculated at different classification levels (species, genus, family). Functional profiling of microbial community members is performed using HUMAnN2 (Franzosa et al., 2018) and reference pathways databases including UniRef90 and ChocoPhlAn. The abundance of metabolic pathways in the gut microbiome are estimated using the HUMAnN2 output.

[0358] Gut permeability analysis: Following FITC-dextran administration to fasted mice, blood will be retro-orbitally collected after 4 hours, and fluorescence intensity will be measured on fluorescence plates using an excitation wavelength of 493 nm and an emission wavelength of 518 nm as previously described (Thevaranjan et al., 2017).

[0359] Circulating pro- and anti-inflammatory cytokine analysis: Blood is collected from each mouse into EDTA treated tubes at the time of sacrifice, and plasma is separated from cells. Cells are saved for peripheral blood mononuclear cell (PB MC) analysis. Plasma samples are analyzed by ELISA or Multiplex assay for circulating inflammatory cytokine levels including but not limited to CRP, TNF-α, IL-1β, IL-2 IL-3, IL-4, IL-5, IL-6, IL-7, IL-8, IL-9, IL-10, IL-12, IL-13, IL-15, IL-17, IL-21, IL-22, IL-23, IL-27 IFNγ, G-CSF, G3M-CSF, IP-10, KC, LIF, LIX, MCP-1, M-CSF, MIG, MIP-1α, MIP-1β, MIP-2, MIP-3, RANTES, RANKL and VEGF as previously described (Schott et al., 2018).

[0360] Peripheral blood mononuclear cell (PBMIC) analysis: P BMC populations are analyzed by flow cytometry as previously described (Rao et al., 2012). Anticoagulant treated blood undergoes density gradient centrifugation in Ficol to isolate PBMC populations from granulocytes, erythrocytes, and platelets. After which, PBMCS are washed thoroughly and resuspended in FACS buffer. Following resuspension cells undergo Fc (Constant Fragment) blocking to obstruct antibody binding to cellular Fc receptors. Cell suspensions are then treated with unique fluorescent antibodies that are specific for immunophenotyping markers. For instance, CD3 antibodies and CD19 antibodies would be used to label T and B cells, respectively. Through this process T cells, T cell subsets, B cells, monocytes, dendritic cells, phagocyte subsets, natural killer cells and other cellular populations, as deemed relevant, are analyzed.

[0361] Bone marrow and splenic immune cell analysis: Bone marrow aspirates and spleens are collected for immune cell phenotyping by flow cytometry and RNAseq as previously described (Tyagi et al., 2018). Upon collection, samples are split in half and either flash frozen for RNA analysis or immediately processed for flow cytometry. Samples are processed for flow cytometry as described for PBMCs, with the addition that spleens are homogenized either mechanically or enzymatically prior to washing and resuspension in FACS buffer.

[0362] Colonic tissue isolation for RNA and protein analysis: Two cm sections of proximal colonic tissue and two cm sections of terminal ileum tissue are isolated, split in half, and flash frozen for RNA and protein evaluation of tight junctions and claudins, critical mediators of gut barrier integrity, as well as inflammatory cytokine levels including but not limited to TNF-α, IL-17, IFNγ and IL-1β. RNA is extracted and analyzed by qRT-PCR, and protein is extracted and evaluated by ELISA and/or western blot as previously described for the aforementioned proteins of interest (Li et al., 2016).

### Rheumatoid Arthritis

[0363] DMAs are evaluated for their therapeutic efficacy in a mouse model of rheumatoid arthritis (R A) called the collagen-induced arthritis model (CIA) as well as in a delayed type hypersensitivity model. For a prototypical CIA mouse model study, all mice are group housed with 3-5 mice per cage in individually ventilated cages (IVCs) specifically designed for germ free husbandry. Adult male and female DBA/1 mice are randomly allocated to experimental groups and allowed to acclimate for two weeks. After an acclimation period, baseline samples of feces and blood are collected, and baseline measures of body mass are recorded. On Day 0, animals are administered by subcutaneous injection with 100 microliters of an emulsion containing 100 micrograms of type II collagen (CII) in incomplete's Freund's adjuvant supplemented with 4 mg/ml Mycobacterium tuberculosis H37Ra. On Day 21, animals are administered by subcutaneous injection with a booster emulsion containing 100 μg of type II collagen in incomplete Freund's adjuvant Beginning from day −14 and continuing through day −45 (end of experiment), mice are administered by bi-daily oral gavage of water (negative control) or one of five test DMAs. From Day −14 until the end of the experiment on Day 45, animals are weighed three times per week. From Day 21 until the end of the experiment, animals are scored three times per week for clinical signs of arthritis to include swelling of the hind- and front paws, radio-carpal (wrist) joints and tibio-tarsal (ankle joints. At the end of the experiment on day 45, mice are euthanized, and tissues are collected from each mouse for downstream analysis as follows.

[0364] Circulating pro- and anti-inflammatory cytokine analysis: Blood is collected from each mouse into EDTA treated tubes at the time of sacrifice, and plasma is separated from cells. Cells are saved for peripheral blood mononuclear cell (PBMC) analysis. Plasma samples are analyzed by ELISA or Multiplex assay for circulating inflammatory cytokine levels including but not limited to CRP, TNF-α, IL-1β, IL-2, IL-3, IL-4, IL-5, IL-6, IL-7, IL-8, IL-9, IL-10, TL-12, IL-13, IL-15, TL-17, IL-21, IL-22, TL-23, IL-27 IFN, G-CSF, GM-CSF, IP-10, KC, LIF, LIX, MCP-1, M-CSF, MIG, MIP-1α, MIP-1β, MIP-2, MIP-3, RANTES, RANKL and VEGF, as previously described (Schott et al., 2018).

[0365] Peripheral blood mononuclear cell (PBMC) analysis: PBMC populations are analyzed by flow cytometry as previously described (Rao et al., 2012). Anticoagulant treated blood undergoes density gradient centrifugation in Ficol to isolate PBMC populations from granulocytes, erythrocytes, and platelets. After which, PBMCS are washed thoroughly and resuspended in FACS buffer. Following resuspension cells undergo Fc (Constant Fragment) blocking to obstruct antibody binding to cellular Fc receptors. Cell suspensions are then treated with unique fluorescent antibodies that are specific for immunophenotyping markers. For instance, CD3 antibodies and CD19 antibodies would be used to label T and B cells, respectively. Through this process T cells, T cell subsets, B cells, monocytes, dendritic cells, phagocyte subsets, natural killer cells and other cellular populations, as deemed relevant, are analyzed.

[0366] Bone marrow and splenic immune cell analysis: Bone marrow aspirates and spleens are collected for immune cell phenotyping by flow cytometry and RNAseq as previously described (Tyagi et al., 2018). Upon collection, samples are split in half and either flash frozen for RNA analysis or immediately processed for flow cytometry. Samples are processed for flow cytometry as described for PBMCs, with the addition that spleens are homogenized either mechanically or enzymatically prior to washing and resuspension in FACS buffer.

[0367] Colonic tissue isolation for RNA and protein analysis: Two cm sections of proximal colonic tissue and two cm sections of terminal ileum tissue are isolated, split in half, and flash frozen for RNA and protein evaluation of tight junctions and claudins, critical mediators of gut barrier integrity, as well as inflammatory cytokine levels including but not limited to TNF-α, IL-17, IFNγ and IL-1β. RNA is extracted and analyzed by qRT-PCR, and protein is extracted and evaluated by ELISA and/or western blot as previously described for the aforementioned proteins of interest (Li et al., 2016).

[0368] Metagenomic analysis of fecal pellets: DNA from the fecal pellets are extracted and the concentration are estimated. DNA libraries are prepared, and. raw sequencing reads are processed. Mouse DNA removal from the metagenomes is performed by mapping reads to the mouse reference genome GRCm38p6. Taxonomic classification of the short-read metagenomes are based on marker genes identified, and organism abundances are calculated at different classification levels (species, genus, family). Functional profiling of microbial community members is performed. The abundance of metabolic pathways in the gut microbiome are estimated using the HUMAnN2 output.

[0369] Histopathology: At the end of the experiment, hind paws are stored in tissue fixative. Samples are transferred into decalcification solution, and tissue samples are processed, sectioned, and stained with Haematoxylin & Eosin. Sections are scored by a qualified histopathologist, blind to the experimental design, for signs of arthritis to include inflammation, articular cartilage damage and damage to the underlying metaphyseal bone. A detailed scoring system is used (see Table 9). Data will be graphed (Mean±SEM). Raw and analyzed data will be provided as well as representative pictures.

TABLE 9
Histopathology scoring system

| Type | Grade | Description |
|---|---|---|
| Inflammation | 0 | Normal Joint |
| | 1 | Mild synovial hyperplasia with inflammation |
| | | dominated by neutrophils. Low numbers of |
| | | neutrophils and macrophages in joint space |
| | 2 | Synovial hyperplasia with moderate to marked |
| | | inflammation involving both neutrophils and |
| | | macrophages. Neutrophils and macrophages in |
| | | joint space; may be some necrotic tissue debris |
| | 3 | Synovial hyperplasia with marked inflammation |
| | | involving both neutrophils and macrophages. Loss |
| | | of synoviocyte lining Inflammation may extend |
| | | from synovium to surrounding tissue including |
| | | muscle. Numerous neutrophils and macrophages in |
| | | joint space, together with significant necrotic |
| | | tissue debris |
| Articular | 0 | Normal joint |
| cartilage | 1 | Articular cartilage shows only mild degenerative |
| damage | | change Early pannus formation may be present |
| | | peripherally. |
| | 2 | Articular cartilage shows moderate degenerative |
| | | change and focal loss. Pannus formation is present |
| | | focally |
| | 3 | Significant disruption and loss of articular cartilage |
| | | with extensive pannus formation |
| Damage | 0 | Normal joint |
| to the | 1 | No change to underlying metaphyseal bone |
| underlying | 2 | May be focal necrosis or fibrosis of metaphyseal |
| metaphyseal | | bone. |
| bone | 3 | Disruption or collapse of metaphyseal bone. |
| | | Extensive inflammation, necrosis or fibrosis |
| | | extending to medullary space of the metaphysis |

### Delayed Type Hypersensitivity Model of Inflammation

[0370] In addition to the collagen-induced arthritis mouse model of RA study described above, a delayed type hypersensitivity study for systemic inflammation is conducted in mice, and is conducted as follows. The studies are conducted in a BSL-1, quarantined room. Mice are acclimated to the facility for 1 week followed by an additional 2-week acclimation with bedding mixing to normalize microbiomes across cages. Fecal microbiome samples are collected 1-2 days prior to mBSA treatment #1. At 8 weeks of age (day 0), animals receive an intra-plantar mBSA (methylated Bovine Serum Albumin) challenge or PBS/Complete fruend's adjuvant (Control) in the right hind paw. At 8 weeks of age (day 0), immediately following mBSA, animals are treated with either DMAs (twice daily) or Dexamethasone (Dex) 5 mg/kg (once daily). Treatment with DMA or Dex is continued until day 8. Mice receiving DMAs are only gavaged in the morning on day 8. On day 8, mice receive an intra-plantar mBSA challenge or PBS/CFA (control) in the right hind paw after Dex or DMA treatment. Paw swelling is measured on day 9. At the end of the study, the spleen, blood plasma, mBSA injected paws, and fecal samples are collected and further characterized as described above. DMAs are identified that reduce paw inflammation and reduce pro-inflammatory cytokine secretion/detection in blood and injected paw samples.

### Imiquimod Model of Psoriasis

[0371] DMAs are evaluated for their therapeutic efficacy in a mouse model of psoriasis. All mice are group housed with up to 5 mice per cage in individually ventilated cages (IVCs) specifically designed for germ free husbandry. After an acclimation period, mice are randomly divided into groups, baseline samples of feces and blood are collected, and baseline measures of body mass are recorded. On day 7, mice begin bi-daily administration by oral gavage with water (negative control) or one of the test DMAs. On Day 0, psoriasis is induced in 8-10 week old C57B/6 male and female mice using the well described Imiquimod model (reviewed in Gangwar et al 2022). Briefly, topical dose of 62.5 mg IMQ cream (5% Aldara) is applied daily to the shaved backs and ears of mice. Control (CTL) animals are treated similarly with a non-toxic petrolatum or lanolin-derived occlusion cream. IMQ and CTL treatments are carried out for 5 consecutive days and mice are sacrificed on day 6. Erythema, scaling, and thickness are scored independently on a scale from 0-4: 0 representing no symptoms, 1 representing slight symptoms, 2 indicating moderate symptoms, 3 indicating marked symptoms, and 4 representing very marked symptoms. A cumulative score (scale: 0-12) is then calculated by adding the scores for all three symptoms. Fecal and serum samples are collected to monitor the functional and taxonomic composition of the gut and immune profile. After the 12-day administration period, tissues are collected from each mouse for downstream analysis as follows.

[0372] Metagenomic analysis of fecal pellets: DNA from the fecal pellets are extracted and the concentration are estimated. DNA libraries are prepared and an equimolar volume of each library will be pooled and sequenced. Raw sequencing reads are processed. Mouse DNA removal from the metagenomes is performed by mapping reads to the mouse reference genome GRCm38p6.

[0373] Taxonomic classification of the short-read metagenomes are based on marker genes identified using MetaPhlAn2 (Segata et al., 2012), and organism abundances are calculated at different classification levels (species, genus, family). Functional profiling of microbial community members is performed using HUMAnN2 (Franzosa et al., 2018) and reference pathways databases including UniRef90 and ChocoPhlAn. The abundance of metabolic pathways in the gut microbiome are estimated using the HUMAnN2 output.

[0374] Circulating pro- and anti-inflammatory cytokine analysis: Blood is collected from each mouse into EDTA treated tubes at the time of sacrifice, and plasma is separated from cells. Cells are saved for peripheral blood mononuclear cell (PBMC) analysis. Plasma samples are analyzed by ELISA or Multiplex assay for circulating inflammatory cytokine levels including but not limited to CRP, TNF-α, IL-1b, IL-2, IL-3, IL-4, IL-5, IL-6, IL-7, IL-8, IL-9, IL-10, IL-12, IL-13, IL-15, IL-17, IL-21, IL-22, IL-23, IL-27 IFNg, G-CSF, GM-CSF, IP-10, KC, LIF, LIX, MCP-1, M-CSF, MIG, MIP-1a, MIP-1b, MIP-2, MIP-3, RANTES, RANKL and VEGF as previously described (Schott et al., 2018).

[0375] Peripheral blood mononuclear cell (PBMC) analysis: PBMC populations are analyzed by flow cytometry as previously described (Rao et al., 2012). Anticoagulant treated blood undergoes density gradient centrifugation in Ficol to isolate PBMC populations from granulocytes, erythrocytes, and platelets. After which, PBMCS are washed thoroughly and resuspended in FACS buffer. Following resuspension cells undergo Fc (Constant Fragment) blocking to obstruct antibody binding to cellular Fc receptors. Cell suspensions are then treated with unique fluorescent antibodies that are specific for immunophenotyping markers. For instance, CD3 antibodies and CD19 antibodies would be used to label T and B cells, respectively. Through this process T cells, T cell subsets, B cells, monocytes, dendritic cells, phagocyte subsets, natural killer cells and other cellular populations, as deemed relevant, are analyzed.

[0376] Bone marrow and splenic immune cell analysis: Bone marrow aspirates and spleens are collected for immune cell phenotyping by flow cytometry and RNAseq as previously described (Tyagi et al., 2018). Upon collection, samples are split in half and either flash frozen for RNA analysis or immediately processed for flow cytometry. Samples are processed for flow cytometry as described for PBMCs, with the addition that spleens are homogenized either mechanically or enzymatically prior to washing and resuspension in FACS buffer.

[0377] Colonic tissue isolation for RNA and protein analysis: Two cm sections of proximal colonic tissue and two cm sections of terminal ileum tissue are isolated, split in half, and flash frozen for RNA and protein evaluation of tight junctions and claudins, critical mediators of gut barrier integrity, as well as inflammatory cytokine levels including but not limited to TNF-α, IL-17, IFNg and IL-1β. RNA is extracted and analyzed by qRT-PCR, and protein is extracted and evaluated by ELISA and/or western blot as previously described for the aforementioned proteins of interest (Li et al., 2016).

[0378] Histopathology: Skin tissue from the backs of the mice is collected and was fixed in 10% buffered formalin solution and embedded in paraffin. Sections (5-10 μm) are prepared and stained with hematoxylin and eosin (H&E). The tissue sections are histologically examined, and epidermal thickness is scored.

[0379] RNA, protein and cytokine analysis of dermal and splenic tissue: Tissue from backs, ears, and spleens are collected. RNA is extracted and analyzed by qRT-PCR as previously described (Glowacki et al., 2013), and protein is extracted and evaluated by ELISA and/or western blot as previously described for the cytokines and proteins of interest including but not limited to I IL-10, TGF-β, TNF-α, IL-17, and IL-23.

### Recombinant IL-23 Induced Psoriasis Model

[0380] DMAs are evaluated for their therapeutic efficacy in a mouse model of psoriasis. All mice are group housed with up to 5 mice per cage in individually ventilated cages (IVCs) specifically designed for germ free husbandry. After an acclimation period, mice are randomly divided into groups, baseline samples of feces and blood are collected, and baseline measures of ear thickness and body mass are recorded. On day 7, mice begin bi-daily administration by oral gavage with water (negative control) or one of the test DMAs. Starting on Day 0, psoriasis is induced in 7-week-old C57B/6 male and female mice using intradermally injected recombinant murine IL-23 (Rizzo et al 2011). Briefly, 1 μg rmIL-23 in PBS/0.1% BSA is injected into ears of mice. Control (CTL) animals are injected similarly with PBS/0.1% BSA. rIL-23 treatments are carried out on alternate days for 8-16 days and mice are sacrificed. Ear thickness is measured daily with calipers. The symptoms of erythema, scaling, and thickness are scored independently on a scale from 0-4: 0 representing no symptoms, 1 representing slight symptoms, 2 indicating moderate symptoms, 3 indicating marked symptoms, and 4 representing very marked symptoms. A cumulative score (scale: 0-12) is then calculated by adding the scores for all three symptoms. Fecal and serum samples are collected to monitor the functional and taxonomic composition of the gut and immune profile. After the 15-23-day administration period, tissues are collected from each mouse for downstream analysis as follows.

[0381] Metagenomic analysis of fecal pellets: DNA from the fecal pellets are extracted and the concentration are estimated. DNA libraries are prepared and an equimolar volume of each library will be pooled and sequenced. Raw sequencing reads are processed. Mouse DNA removal from the metagenomes is performed by mapping reads to the mouse reference genome GRCm38p6.

[0382] Taxonomic classification of the short-read metagenomes are based on marker genes identified using MetaPhlAn2 (Segata et al., 2012), and organism abundances are calculated at different classification levels (species, genus, family). Functional profiling of microbial community members is performed using HUMAnN2 (Franzosa et al., 2018) and reference pathways databases including UniRef90 and ChocoPhlAn. The abundance of metabolic pathways in the gut microbiome are estimated using the HUMAnN2 output.

[0383] Circulating pro- and anti-inflammatory cytokine analysis: Blood is collected from each mouse into EDTA treated tubes at the time of sacrifice, and plasma is separated from cells. Cells are saved for peripheral blood mononuclear cell (PBMC) analysis. Plasma samples are analyzed by ELISA or Multiplex assay for circulating inflammatory cytokine levels including but not limited to CRP, TNF-α, IL-1b, IL-2, IL-3, IL-4, IL-5, IL-6, IL-7, IL-8, IL-9, IL-10, IL-12, IL-13, IL-15, IL-17, IL-21, IL-22, IL-23, IL-27 IFNg, G-CSF, GM-CSF, IP-10, KC, LIF, LIX, MCP-1, M-CSF, MIG, MIP-1a, MIP-1b, MIP-2, MIP-3, RANTES, RANKL and VEGF as previously described (Schott et al., 2018).

[0384] Peripheral blood mononuclear cell (PBMC) analysis: PBMC populations are analyzed by flow cytometry as previously described (Rao et al., 2012). Anticoagulant treated blood undergoes density gradient centrifugation in Ficol to isolate PBMC populations from granulocytes, erythrocytes, and platelets. After which, PBMCS are washed thoroughly and resuspended in FACS buffer. Following resuspension cells undergo Fc (Constant Fragment) blocking to obstruct antibody binding to cellular Fc receptors. Cell suspensions are then treated with unique fluorescent antibodies that are specific for immunophenotyping markers. For instance, CD3 antibodies and CD19 antibodies would be used to label T and B cells, respectively. Through this process T cells, T cell subsets, B cells, monocytes, dendritic cells, phagocyte subsets, natural killer cells and other cellular populations, as deemed relevant, are analyzed.

[0385] Bone marrow and splenic immune cell analysis: Bone marrow aspirates and spleens are collected for immune cell phenotyping by flow cytometry and RNAseq as previously described (Tyagi et al., 2018). Upon collection, samples are split in half and either flash frozen for RNA analysis or immediately processed for flow cytometry. Samples are processed for flow cytometry as described for PBMCs, with the addition that spleens are homogenized either mechanically or enzymatically prior to washing and resuspension in FACS buffer.

[0386] Colonic tissue isolation for RNA and protein analysis: Two cm sections of proximal colonic tissue and two cm sections of terminal ileum tissue are isolated, split in half, and flash frozen for RNA and protein evaluation of tight junctions and claudins, critical mediators of gut barrier integrity, as well as inflammatory cytokine levels including but not limited to TNF-α, IL-17, IFNg and IL-1β. RNA is extracted and analyzed by qRT-PCR, and protein is extracted and evaluated by ELISA and/or western blot as previously described for the aforementioned proteins of interest (Li et al., 2016).

[0387] Histopathology: Skin tissue from the ears of the mice is collected and was fixed in 10% buffered formalin solution and embedded in paraffin. Sections (5-10 μm) are prepared and stained with hematoxylin and eosin (H&E). The tissue sections are histologically examined, and epidermal thickness is scored.

[0388] RNA, protein and cytokine analysis of dermal and splenic tissue: Tissue from ears, and spleens are collected. RNA is extracted and analyzed by qRT-PCR as previously described (Glowacki et al., 2013), and protein is extracted and evaluated by ELISA and/or western blot as previously described for the cytokines and proteins of interest including but not limited to I IL-10, TGF-β, TNF-α, IL-17, and IL-23.

### Psoriatic Arthritis

[0389] DMAs are evaluated for their therapeutic efficacy in a mouse model of psoriasis and psoriatic arthritis. All mice are group housed with up to 5 mice per cage in individually ventilated cages (IVCs) specifically designed for germ free husbandry. After an acclimation period, mice are randomly divided into groups, baseline samples of feces and blood are collected, and baseline measures of body mass are recorded. On day −7 mice begin bi-daily administration by oral gavage with water (negative control) or one of the test DMAs. On day 0 B10Q.Ncf1m1j/m1j mice are injected i.p. with 10 or 20 mg of mannan from the yeast, S. cerevisiae dissolved in 200 μL of PBS. Mice are scored daily for inflammation in the peripheral joints. The severity and incidence of the Ps-like skin manifestations are monitored on a scale ranging from 1 to 3 per mouse based on the severity of skin scaling on the paws: 1, weak skin peeling; 2, moderate skin peeling; and 3, heavy skin peeling with some hair loss. Weekly fecal and serum samples are collected to monitor the functional and taxonomic composition of the gut and immune profile over time. After the 14-day administration period, tissues are collected from each mouse for downstream analysis as follows.

[0390] Metagenomic analysis of fecal pellets: DNA from the fecal pellets are extracted and the concentration are estimated. DNA libraries are prepared and an equimolar volume of each library will be pooled and sequenced. Raw sequencing reads are processed. Mouse DNA removal from the metagenomes is performed by mapping reads to the mouse reference genome GRCm38p6.

[0391] Taxonomic classification of the short-read metagenomes are based on marker genes identified using MetaPhlAn2 (Segata et al., 2012), and organism abundances are calculated at different classification levels (species, genus, family). Functional profiling of microbial community members is performed using HUMAnN2 (Franzosa et al., 2018) and reference pathways databases including UniRef90 and ChocoPhlAn. The abundance of metabolic pathways in the gut microbiome are estimated using the HUMAnN2 output.

[0392] Circulating pro- and anti-inflammatory cytokine analysis: Blood is collected from each mouse into EDTA treated tubes at the time of sacrifice, and plasma is separated from cells. Cells are saved for peripheral blood mononuclear cell (PBMC) analysis. Plasma samples are analyzed by ELISA or Multiplex assay for circulating inflammatory cytokine levels including but not limited to CRP, TNF-α, IL-1b, IL-2, IL-3, IL-4, IL-5, IL-6, IL-7, IL-8, IL-9, IL-10, IL-12, IL-13, IL-15, IL-17, IL-21, IL-22, IL-23, IL-27 IFNg, G-CSF, GM-CSF, IP-10, KC, LIF, LIX, MCP-1, M-CSF, MIG, MIP-1a, MIP-1b, MIP-2, MIP-3, RANTES, RANKL and VEGF as previously described (Schott et al., 2018).

[0393] Peripheral blood mononuclear cell (PBMC) analysis: PBMC populations are analyzed by flow cytometry as previously described (Rao et al., 2012). Anticoagulant treated blood undergoes density gradient centrifugation in Ficol to isolate PBMC populations from granulocytes, erythrocytes, and platelets. After which, PBMCS are washed thoroughly and resuspended in FACS buffer. Following resuspension cells undergo Fc (Constant Fragment) blocking to obstruct antibody binding to cellular Fc receptors. Cell suspensions are then treated with unique fluorescent antibodies that are specific for immunophenotyping markers. For instance, CD3 antibodies and CD19 antibodies would be used to label T and B cells, respectively. Through this process T cells, T cell subsets, B cells, monocytes, dendritic cells, phagocyte subsets, natural killer cells and other cellular populations, as deemed relevant, are analyzed.

[0394] Bone marrow and splenic immune cell analysis: Bone marrow aspirates and spleens are collected for immune cell phenotyping by flow cytometry and RNAseq as previously described (Tyagi et al., 2018). Upon collection, samples are split in half and either flash frozen for RNA analysis or immediately processed for flow cytometry. Samples are processed for flow cytometry as described for PBMCs, with the addition that spleens are homogenized either mechanically or enzymatically prior to washing and resuspension in FACS buffer.

[0395] Colonic tissue isolation for RNA and protein analysis: Two cm sections of proximal colonic tissue and two cm sections of terminal ileum tissue are isolated, split in half, and flash frozen for RNA and protein evaluation of tight junctions and claudins, critical mediators of gut barrier integrity, as well as inflammatory cytokine levels including but not limited to TNF-α, IL-17, IFNg and IL-1β. RNA is extracted and analyzed by qRT-PCR, and protein is extracted and evaluated by ELISA and/or western blot as previously described for the aforementioned proteins of interest (Li et al., 2016).

[0396] Histopathology: Naive and diseased mouse paws and healthy and psoriatic/eczematic skin biopsies are fixed in 4% paraformaldehyde, decalcified (only mouse paws), and embedded in paraffin. The ear tissue is frozen and embedded, and 10-μm sections are stained with H&E for the assessment of inflammation. For the evaluation of arthritis activity and severity in the ankle joint sections, the following histopathological scoring protocol is used: 1, mild synovitis with hyperplastic synovial membrane, small focal infiltration of inflammatory cells, and increased numbers of vessels in the synovium with no bone or cartilage erosions; 2, moderate synovitis, entheseal inflammation, cartilage erosions, and undisrupted joint architecture; and 3, severe pannus formation with extensive erosions of bone and cartilage and disrupted joint architecture.

[0397] RNA, protein, and cytokine analysis of dermal, joint, and splenic tissue: Tissue from backs, ears, paws and spleens are collected. RNA is extracted and analyzed by qRT-PCR as previously described (Glowacki et al., 2013), and protein is extracted and evaluated by ELISA and/or western blot as previously described for the cytokines and proteins of interest including but not limited to IL-10, TGF-β, TNF-α, IL-17, and IL-23.

### IL-23 EEV Induced Psoriasis/Psoriatic Arthritis Model

[0398] DMAs are evaluated for their therapeutic efficacy in a mouse model of psoriasis and psoriatic arthritis. All mice are group housed with up to 5 mice per cage in individually ventilated cages (IVCs) specifically designed for germ free husbandry. After an acclimation period, mice are randomly divided into groups, baseline samples of feces and blood are collected, and baseline measures of body mass are recorded. On day −7 mice begin bi-daily administration by oral gavage with water (negative control) or one of the test DMAs. On day 0, 9-10 week old Male B10.RIII mice are given 75 ng IL-23 enhanced episomal vector (EEV) (System Biosciences, Palo Alto, CA, USA) or empty CAGS EEV by hydrodynamic delivery (HDD) (Mortier et al 2023). Mice are scored daily for inflammation in the peripheral joints for seven days. The severity and incidence of the Ps-like skin manifestations are monitored on a scale ranging from 1 to 3 per mouse based on the severity of skin scaling on the paws: 1, weak skin peeling; 2, moderate skin peeling; and 3, heavy skin peeling with some hair loss. Weekly fecal and serum samples are collected to monitor the functional and taxonomic composition of the gut and immune profile over time. After the 35-day administration period, tissues are collected from each mouse for downstream analysis as follows.

[0399] Metagenomic analysis of fecal pellets: DNA from the fecal pellets are extracted and the concentration are estimated. DNA libraries are prepared and an equimolar volume of each library will be pooled and sequenced. Raw sequencing reads are processed. Mouse DNA removal from the metagenomes is performed by mapping reads to the mouse reference genome GRCm38p6.

[0400] Taxonomic classification of the short-read metagenomes are based on marker genes identified using MetaPhlAn2 (Segata et al., 2012), and organism abundances are calculated at different classification levels (species, genus, family). Functional profiling of microbial community members is performed using HUMAnN2 (Franzosa et al., 2018) and reference pathways databases including UniRef90 and ChocoPhlAn. The abundance of metabolic pathways in the gut microbiome are estimated using the HUMAnN2 output.

[0401] Circulating pro- and anti-inflammatory cytokine analysis: Blood is collected from each mouse into EDTA treated tubes at the time of sacrifice, and plasma is separated from cells. Cells are saved for peripheral blood mononuclear cell (PBMC) analysis. Plasma samples are analyzed by ELISA or Multiplex assay for circulating inflammatory cytokine levels including but not limited to CRP, TNF-α, IL-1β, IL-2, IL-3, IL-4, IL-5, IL-6, IL-7, IL-8, IL-9, IL-10, IL-12, IL-13, IL-15, IL-17, IL-21, IL-22, IL-23, IL-27 IFNγ, G-CSF, GM-CSF, IP-10, KC, LIF, LIX, MCP-1, M-CSF, MIG, MIP-1α, MIP-1β, MIP-2, MIP-3, RANTES, RANKL and VEGF as previously described (Schott et al., 2018).

[0402] Peripheral blood mononuclear cell (PBMC) analysis: PBMC populations are analyzed by flow cytometry as previously described (Rao et al., 2012). Anticoagulant treated blood undergoes density gradient centrifugation in Ficol to isolate PBMC populations from granulocytes, erythrocytes, and platelets. After which, PBMCS are washed thoroughly and resuspended in FACS buffer. Following resuspension cells undergo Fc (Constant Fragment) blocking to obstruct antibody binding to cellular Fc receptors. Cell suspensions are then treated with unique fluorescent antibodies that are specific for immunophenotyping markers. For instance, CD3 antibodies and CD19 antibodies would be used to label T and B cells, respectively. Through this process T cells, T cell subsets, B cells, monocytes, dendritic cells, phagocyte subsets, natural killer cells and other cellular populations, as deemed relevant, are analyzed.

[0403] Bone marrow and splenic immune cell analysis: Bone marrow aspirates and spleens are collected for immune cell phenotyping by flow cytometry and RNAseq as previously described (Tyagi et al., 2018). Upon collection, samples are split in half and either flash frozen for RNA analysis or immediately processed for flow cytometry. Samples are processed for flow cytometry as described for PBMCs, with the addition that spleens are homogenized either mechanically or enzymatically prior to washing and resuspension in FACS buffer.

[0404] Colonic tissue isolation for RNA and protein analysis: Two cm sections of proximal colonic tissue and two cm sections of terminal ileum tissue are isolated, split in half, and flash frozen for RNA and protein evaluation of tight junctions and claudins, critical mediators of gut barrier integrity, as well as inflammatory cytokine levels including but not limited to TNF-α, IL-17, IFNγ and IL-1β. RNA is extracted and analyzed by qRT-PCR, and protein is extracted and evaluated by ELISA and/or western blot as previously described for the aforementioned proteins of interest (Li et al., 2016).

[0405] Histopathology: Naive and diseased mouse paws and healthy and psoriatic/eczematic skin biopsies are fixed in 4% paraformaldehyde, decalcified (only mouse paws), and embedded in paraffin. The ear tissue is frozen and embedded in Tissue Tec medium, and 10-μm sections are stained with H&E for the assessment of inflammation. For the evaluation of arthritis activity and severity in the ankle joint sections, the following histopathological scoring protocol is used: 1, mild synovitis with hyperplastic synovial membrane, small focal infiltration of inflammatory cells, and increased numbers of vessels in the synovium with no bone or cartilage erosions; 2, moderate synovitis, entheseal inflammation, cartilage erosions, and undisrupted joint architecture; and 3, severe pannus formation with extensive erosions of bone and cartilage and disrupted joint architecture.

[0406] RNA, protein, and cytokine analysis of dermal, joint, and splenic tissue: Tissue from backs, ears, paws and spleens are collected. RNA is extracted and analyzed by qRT-PCR as previously described (Glowacki et al., 2013), and protein is extracted and evaluated by ELISA and/or western blot as previously described for the cytokines and proteins of interest including but not limited to IL-10, TGF-β, TNF-α, IL-17, and IL-23.

H. pylori-Associated Gastritis

[0407] DMAs are evaluated for their therapeutic efficacy in a mouse model of Helicobacter pylori-associated gastritis. All mice are group housed with 5 mice per cage in individually ventilated cages (IVCs) specifically designed for germ free husbandry. Adult male and female C57Bl/6J mice are randomly allocated to experimental groups and allowed to acclimate for two weeks. After an acclimation period, baseline samples of feces and blood are collected, and baseline measures of body mass are recorded. On Day 0, animals are infected three times over a 5-day period with a 0.1 ml volume containing 10⁸ H. pylori (Sydney strain, SS1) organisms. Two weeks following infection, mice are treated by bi-daily oral gavage of water (negative control), triple antibiotic therapy of omeprazole, metronidazole, and clarithromycin (positive control), or one of five test DMAs for a period of 2-weeks. Fecal samples are collected weekly for metagenomic analysis. All animals are sacrificed 36 hours after the cessation of treatment for assessment of bacterial colonization by rapid qPCR and histology.

[0408] Histology. One-half of each stomach is placed into 10% buffered formalin and processed in paraffin, and 4-um sections will be stained with a modified Steiner silver stain. Colonization is assessed on a five-point scale: 0, no bacteria; 1, less than ⅓ of crypts colonized with 1 to 10 bacteria; 2, ⅓ to ⅔ of crypts colonized with 10 to 20 bacteria; 3, ⅔ of the crypts colonized with >20 bacteria; and 4, all crypts colonized with >20 bacteria as previously described (Velduyzen van Zanten et al., 2003).

[0409] Confirmation of H. pylori eradication by quantitative PCR: A longitudinal strip of gastric tissue from the greater curvature is digested with proteinase K at 55° C. overnight, followed by DNA extraction. H. pylori colonization levels in gastric tissue is quantified by PCR with strain specific primers as previously described (Velduyzen van Zanten et al., 2003). Any sample detecting <10 copies of the H. pylori genome is considered negative for H. pylori colonization.

[0410] Inflammatory cytokine quantification by qRTPCR: A longitudinal strip of gastric tissue from the greater curvature is isolated, and RNA is extracted and analyzed by qRT-PCR as previously described (Velduyzen van Zanten et al., 2003) to quantify inflammatory cytokines in the stomach tissue including but not limited to TNF-α, IL-1, and IFNγ.

[0411] Metagenomic analysis of fecal pellets: DNA from the fecal pellets are extracted and the concentration are estimated. DNA libraries are prepared and an equimolar volume of each library will be pooled and sequenced. Raw sequencing reads are processed. Mouse DNA removal from the metagenomes is performed by mapping reads to the mouse reference genome GRCm38p6.

[0412] Taxonomic classification of the short-read metagenomes are based on marker genes identified using MetaPhlAn2 (Segata et al., 2012), and organism abundances are calculated at different classification levels (species, genus, family). Functional profiling of microbial community members is performed using HUMAnN2 (Franzosa et al., 2018) and reference pathways databases including UniRef90 and ChocoPhlAn. The abundance of metabolic pathways in the gut microbiome are estimated using the HUMAnN2 output.

[0413] All references, issued patents and patent applications cited within the body of the instant specification are hereby incorporated by reference in their entirety, for all purposes.

### REFERENCES

[0414] Altschul et al. Basic local alignment search tool. J. Mol. Biol., 215:403-410 (1990)
[0415] Bansal, T., Alaniz, R. C., Wood, T. K., & Jayaraman, A. (2010). The bacterial signal indole increases epithelial-cell tight-junction resistance and attenuates indicators of inflammation. Proceedings of the National Academy of Sciences of the United States of America, 107(1), 228-233. https://doi.org/10.1073/pnas.0906112107
[0416] Bartelt, R. R., Cruz-Orcutt, N., Collins, M. & Houtman, J. C. D. Comparison of T cell receptor-induced proximal signaling and downstream functions in immortalized and primary T cells. PLoS One 4, e5430 (2009).
[0417] Briani C et al. Cobalamin Deficiency: Clinical Picture and Radiological Findings. Nutrients. 5:11, 4521-4539. (2013)
[0418] Caffaratti, C., Plazy, C., Mery, G., Tidjani, A. R., Fiorini, F., Thiroux, S., Toussaint, B., Hannani, D., & Le Gouellec, A. (2021). What We Know So Far about the Metabolite-Mediated Microbiota-Intestinal Immunity Dialogue and How to Hear the Sound of This Crosstalk. Metabolites, 11(6), 406. https://doi.org/10.3390/metabo11060406
[0419] Cario E. (2008). Barrier-protective function of intestinal epithelial Toll-like receptor 2. Mucosal immunology, 1 Suppl 1, S62-S66. https://doi.org/10.1038/mi.2008.47
[0420] Chamba, J.-F. & Perreard, É. Contribution of propionic acid bacteria to lipolysis of Emmental cheese. Lait 82, 33-44 (2002).
[0421] Chassaing, B., Ley, R. E., & Gewirtz, A. T. (2014). Intestinal epithelial cell toll-like receptor 5 regulates the intestinal microbiota to prevent low-grade inflammation and metabolic syndrome in mice. Gastroenterology, 147(6), 1363-77.e17. https://doi.org/10.1053/j.gastro.2014.08.033
[0422] Chen et al. Modulating AHR function offers exciting therapeutic potential in gut immunity and inflammation Cell & Bioscience 2023
[0423] Cheng, Q. et al. A Synergistic Indole-3-Acetic Acid-Producing Synthetic Bacterial Consortium Benefits Walnut Seedling Growth. Agronomy 14, 1657 (2024).
[0424] Cox et al. SolexaQA: At-a-glance quality assessment of Illumina second-generation sequencing data. BMC Bioinformatics. 11:485 (2010)
[0425] Czerucka, D., Piche, T. & Rampal, P. Review article: yeast as probiotics—Saccharomyces boulardii. Alimentary Pharmacology & Therapeutics 26, 767-778 (2007).
[0426] D'Aimmo M R., et. al. The potential of Bifidobacteria as a source of natural folate. Journal of Applied Microbiology. 112:975-984 (2012).
[0427] Das et al. Metagenomic analysis of microbe-mediated vitamin metabolism in the human gut microbiome. BMC Genomics. 20(1):208 (2019)
[0428] Denison, M. S., Pandini, A., Nagy, S. R., Baldwin, E. P. & Bonati, L. Ligand binding and activation of the Ah receptor. Chem Biol Interact 141, 3-24 (2002).
[0429] DiVincenzo et al. Gut microbiota, intestinal permeability, and systemic inflammation: a narrative review IEM 2023
[0430] Fasano, A. All disease begins in the (leaky) gut: role of zonulin-mediated gut permeability in the pathogenesis of some chronic inflammatory diseases. F1000Res 9, F1000 Faculty Rev-69 (2020)
[0431] Fang H. et al. Microbial production of vitamin B12: a review and future perspectives. Microb Cell Fact. 16(1):15 (2017)
[0432] Franzosa et al. Species-level functional profiling of metagenomes and metatranscriptomes Nat. Methods. 15. 962-968 (2018)
[0433] Gao, J., Xu, K., Liu, H., Liu, G., Bai, M., Peng, C., Li, T., & Yin, Y. (2018). Impact of the Gut Microbiota on Intestinal Immunity Mediated by Tryptophan Metabolism. Frontiers in cellular and infection microbiology, 8, 13. https://doi.org/10.3389/fcimb2018.00013
[0434] Gangwar, R. S., Gudjonsson, J. E., Ward, N. L. (2022). Mouse Models of Psoriasis: A Comprehensive Review. J Invest Dermatol 142, 884-897. https://doi.org/10.1016/j.jid.2021.06.019
[0435] Ghosh et al. Intestinal Barrier Dysfunction, LPS Translocation, and Disease Development Journal of the Endocrine Society. 2020
[0436] Ghosh, S., et al., Regulation of Intestinal Barrier Function by Microbial Metabolites. Cell Mol Gastroenterol Hepatol 11, 1463-1482 (2021)
[0437] Glowacki, A. J., Yoshizawa, S., Jhunjhunwala, S., Vieira, A. E., Garlet, G. P., Sfeir, C., & Little, S. R. (2013). Prevention of inflammation-mediated bone loss in murine and canine periodontal disease via recruitment of regulatory lymphocytes. Proceedings of the National Academy of Sciences of the United States of America, 110(46), 18525-18530. https://doi.org/10.1073/pnas.1302829110
[0438] Godoy-Vitorino, F. Insights into Gut Dysbiosis: Inflammatory Diseases, Obesity, and Restoration Approaches. MDPI, 2024
[0439] The Handbook of Pharmaceutical Excipients. 6^{th} edition. American Pharmaceutical Association (1986)
[0440] Higgins, S. C., Lavelle, E. C., McCann, C., Keogh, B., McNeela, E., Byrne, P., O'Gorman, B., Jarnicki, A., McGuirk, P., & Mills, K. H. (2003). Toll-like receptor 4-mediated innate IL-10 activates antigen-specific regulatory T cells and confers resistance to Bordetella pertussis by inhibiting inflammatory pathology. Journal of immunology (Baltimore, Md.: 1950), 171(6), 3119-3127. https://doi.org/10.4049/jimmunol.171.6.3119
[0441] Hua, M.-C. et al. Probiotic Bio-Three induces Th1 and anti-inflammatory effects in PBMC and dendritic cells. World J Gastroenterol 16, 3529-3540 (2010).
[0442] Issac I, et al. Vitamin B12 Deficiency: An Important Reversible Co-Morbidity in Neuropsychiatric Manifestations. Indian Journal of Psychiatric Medicine. 37:1, 26-29. (2015)
[0443] Jang, S., Uematsu, S., Akira, S., & Salgame, P. (2004). IL-6 and IL-10 induction from dendritic cells in response to Mycobacterium tuberculosis is predominantly dependent on TLR2-mediated recognition. Journal of immunology (Baltimore, Md.: 1950), 173(5), 3392-3397. https://doi.org/10.4049/jimmunol.173.5.3392
[0444] Kim et al. FMAP: Functional Mapping and Analysis Pipeline for metagenomics and metatranscriptomics studies. BMC Bioinf 17:420 (2016)
[0445] Kimura, I., Ichimura, A., Ohue-Kitano, R. & Igarashi, M. Free Fatty Acid Receptors in Health and Disease. Physiological Reviews 100, 171-210 (2020).
[0446] Kleiveland, C. R. Peripheral Blood Mononuclear Cells. in The Impact of Food Bioactives on Health: in vitro and ex vivo models (eds. Verhoeckx, K. et al.) (Springer, Cham (CH), 2015)
[0447] Kok D, et al. Bacterial folate biosynthesis and colorectal cancer risk: more than just a gut feeling. Critical Reviews in Food Science and Nutrition. 60:2, 244-256 (2018)
[0448] Laiño J E., et. al. Applicability of a Lactobacillus amylovorus strain as a co-culture for natural folate bio-enrichment of fermented milk. International Journal of Food Microbiology. 191:10-16. (2014).
[0449] Lawenius, L. et al. Development of a synbiotic that protects against ovariectomy-induced trabecular bone loss. American Journal of Physiology-Endocrinology and Metabolism 322, E344-E354 (2022).
[0450] Li, P., Gu, Q., Zhou, Q. Complete genome sequence of Lactobacillus plantarum LZ206, a potential probiotic strain with antimicrobial activity against food-borne pathogenic microorganisms. Journal of Biotechnology. 238:(52-55). (2016).
[0451] Li, J. Y., Chassaing, B., Tyagi, A. M., Vaccaro, C., Luo, T., Adams, J., Darby, T. M., Weitzmann, M. N., Mulle, J. G., Gewirtz, A. T., Jones, R. M., & Pacifici, R. (2016). Sex steroid deficiency-associated bone loss is microbiota dependent and prevented by probiotics. The Journal of clinical investigation, 126(6), 2049-2063. https://doi.org/10.1172/JCI86062
[0452] Liu, P. et al. The role of short-chain fatty acids in intestinal barrier function, inflammation, oxidative stress, and colonic carcinogenesis. Pharmacological Research 165, 105420 (2021).
[0453] Macfarlane, S., & Macfarlane, G. T. (2003). Regulation of short-chain fatty acid production. The Proceedings of the Nutrition Society, 62(1), 67-72. https://doi.org/10.1079/PNS2002207
[0454] Magnusdottir et al. Generation of genome-scale metabolic reconstructions for 773 members of the human gut microbiota. Nat. Biotech. 35, 81-8 (2016)
[0455] Mann et al Short-chain fatty acids: linking diet, the microbiome and immunity Nature Reviews Immunology 2024
[0456] Marinelli, L., Martin-Gallausiaux, C., Bourhis, J M. et al. Identification of the novel role of butyrate as AhR ligand in human intestinal epithelial cells. Sci Rep 9, 643 (2019). https://doi.org/10.1038/s41598-018-37019-2
[0457] Mortier, C., Gracey, E., Coudenys, J., Manuello, T., Decruy, T., Maelegheer, M., Stappers, F., Gilis, E., Gaublomme, D., Van Hoorebeke, L., Van Welden, S., Ambler, C., Hegen, M., Symanowicz, P., Steyn, S., Berstein, G., Elewaut, D., Venken, K. (2023). RORγt inhibition ameliorates IL-23 driven experimental psoriatic arthritis by predominantly modulating γδ-T cells. Rheumatology, kead022.
[0458] Needleman and Wunsch. A General Method Applicable to the Search for Similarities in the Amino Acid Sequence of Two Proteins. J. Mol. Biol. 48:443 (1970)
[0459] Nguyen, B. N., Chávez-Arroyo, A., Cheng, M. I., Krasilnikov, M., Louie, A., & Portnoy, D. A. (2020). TLR2 and endosomal TLR-mediated secretion of IL-10 and immune suppression in response to phagosome-confined Listeria monocytogenes. PLoS pathogens, 16(7), e1008622. https://doi.org/10.1371/journal.ppat.1008622
[0460] Paik, J. K. et al. Circulating and PBMC Lp-PLA2 Associate Differently with Oxidative Stress and Subclinical Inflammation in Nonobese Women (Menopausal Status). PLOS ONE 7, e29675 (2012).
[0461] Paradis, T., Bègue, H., Basmaciyan, L., Dalle, F. & Bon, F. Tight Junctions as a Key for Pathogens Invasion in Intestinal Epithelial Cells. International Journal of Molecular Sciences 22, 2506 (2021).
[0462] Pearson and Lipman. Improved Tools for Biological Sequence Comparison. Proc. Nat'l. Acad. Sci. USA 85:2444 (1988)
[0463] Peng Y., et al. IDBA—A Practical Iterative de Bruijn Graph De Novo Assembler. Lisbon: RECOMB; (2010)
[0464] Postler, T. S., & Ghosh, S. (2017). Understanding the Holobiont: How Microbial Metabolites Affect Human Health and Shape the Immune System. Cell metabolism, 26(1), 110-130. https://doi.org/10.1016/j.cmet.2017.05.008
[0465] Rachon, D., Mysliwska, J., Suchecka-Rachon, K., Wieckiewicz, J. & Mysliwski, A. Effects of oestrogen deprivation on interleukin-6 production by peripheral blood mononuclear cells of postmenopausal women. (2002) doi:10.1677/joe.0.1720387.
[0466] Rathbone et al. Modified-Release Drug Delivery Technology (Drugs and the Pharmaceutical Sciences Book 184) 2nd Edition, Marcel Dekker, Inc. New York, N.Y. (2002).
[0467] Rao, S. P., Sancho, J., Campos-Rivera, J., Boutin, P. M., Severy, P. B., Weeden, T., Shankara, S., Roberts, B. L., & Kaplan, J. M. (2012). Human peripheral blood mononuclear cells exhibit heterogeneous CD52 expression levels and show differential sensitivity to alemtuzumab mediated cytolysis. PloS one, 7(6), e39416.
[0468] Remington's pharmaceutical sciences, 17th edition. Edited by Alfonso R. Gennaro. Mack Publishing Co., 20th and Northampton Streets, Easton, PA 18042 (1985)
[0469] Rizzo, H. L., Kagami, S., Phillips, K. G., Kurtz, S. E., Jacques, S. L., Blauvelt, A. (2011). IL-23-mediated psoriasis-like epidermal hyperplasia is dependent on IL-17A. J Immunol, 186, 1495-1502.
[0470] Salimi, F., Farrokh, P. Recent advances in the biological activities of microbial exopolysaccharides. World J Microbiol Biotechnol 2023
[0471] Saraiva, M., & O'Garra, A. (2010). The regulation of IL-10 production by immune cells. Nature reviews. Immunology, 10(3), 170-181.
[0472] Schildberger, A., Rossmanith, E., Eichhorn, T., Strassl, K. & Weber, V. Monocytes, peripheral blood mononuclear cells, and THP-1 cells exhibit different cytokine expression patterns following stimulation with lipopolysaccharide. Mediators Inflamm 2013, 697972 (2013).
[0473] Schlatterer, K., Peschel, A. & Kretschmer, D. Short-Chain Fatty Acid and FFAR2 Activation—A New Option for Treating Infections? Front. Cell. Infect. Microbiol. 11, (2021).
[0474] Schoch C L, et al. Nuclear ribosomal internal transcribed spacer (ITS) region as a universal DNA barcode marker for Fungi. Proc Natl Acad Sci USA 109:6241-6246 (2012)
[0475] Schott, E. M., Farnsworth, C. W., Grier, A., Lillis, J. A., Soniwala, S., Dadourian, G. H., Bell, R. D., Doolittle, M. L., Villani, D. A., Awad, H., Ketz, J. P., Kamal, F., Ackert-Bicknell, C., Ashton, J. M., Gill, S. R., Mooney, R. A., & Zuscik, M. J. (2018). Targeting the gut microbiome to treat the osteoarthritis of obesity. JCI insight, 3(8), e95997.
[0476] Scortichini, S., Boarelli, M. C., Silvi, S., & Fiorini, D. (2020). Development and validation of a GC-FID method for the analysis of short chain fatty acids in rat and human faeces and in fermentation fluids. Journal of chromatography. B, Analytical technologies in the biomedical and life sciences, 1143, 121972. https://doi.org/10.1016/j.jchromb.2020.121972
[0477] Segata, N., Waldron, L., Ballarini, A., Narasimhan, V., Jousson, O., & Huttenhower, C. (2012). Metagenomic microbial community profiling using unique clade-specific marker genes. Nature methods, 9(8), 811-814. https://doi.org/10.1038/nmeth.2066
[0478] Sethi, S., & Samantaray, U. S. (2021). Isolation and biochemical characterization of indole-3-acetic acid (IAA) produced in Pseudomonas sp. isolated from rhizospheric soil. International Journal for Research in Applied Sciences and Biotechnology, 8(4). https://doi.org/10.31033/ijrasb.8.4.1
[0479] Smith and Waterman. Comparison of biosequences. Adv. Appl. Math. 2:482 (1981)
[0480] Srinivasan, B. et al. TEER Measurement Techniques for In Vitro Barrier Model Systems. SLAS Technology 20, 107-126 (2015).
[0481] Strandwitz P. Neurotransmitter modulation by the gut microbiota. Brain Res. 2018 Aug. 15; 1693(Pt B):128-133
[0482] Sugahara H., et. al. Probiotic Bifidobacterium longum alters gut luminal metabolism through modification of the gut microbial community. Scientific Reports. 13548 (2015).
[0483] Terry P, et al. Dietary intake of folic acid and colorectal cancer risk in a cohort of women. International Journal of Cancer. 97:6, 864-867 (2002)
[0484] Thevaranjan, N., Puchta, A., Schulz, C., Naidoo, A., Szamosi, J. C., Verschoor, C. P., Loukov, D., Schenck, L. P., Jury, J., Foley, K. P., Schertzer, J. D., Larche, M. J., Davidson, D. J., Verdn, E. F., Surette, M. G., & Bowdish, D. (2017). Age-Associated Microbial Dysbiosis Promotes Intestinal Permeability, Systemic Inflammation, and Macrophage Dysfunction. Cell host & microbe, 21(4), 455-466.e4.
[0485] Truong et al. MetaPhlAn2 for enhanced metagenomic taxonomic profiling. Nature Methods. 12:10 (2015)
[0486] Tyagi, A. M., Yu, M., Darby, T. M., Vaccaro, C., Li, J. Y., Owens, J. A., Hsu, E., Adams, J., Weitzmann, M. N., Jones, R. M., & Pacifici, R. (2018). The Microbial Metabolite Butyrate Stimulates Bone Formation via T Regulatory Cell-Mediated Regulation of WNT10B Expression. Immunity, 49(6), 1116-1131.e7.
[0487] Velduyzen van Zanten, S. J., Kolesnikow, T., Leung, V., O'Rourke, J. L., & Lee, A. (2003). Gastric transitional zones, areas where Helicobacter treatment fails: results of a treatment trial using the Sydney strain mouse model. Antimicrobial agents and chemotherapy, 47(7), 2249-2255.
[0488] Vijay-Kumar, M. et al. Deletion of TLR5 results in spontaneous colitis in mice. J Clin Invest 117, 3909-3921 (2007).
[0489] Yin et al. dbCAN: a web resource for automated carbohydrate-active enzyme annotation. Nucleic Acids Res. 40 (2012)
[0490] Zhang et al. dbCAN2: a meta server for automated carbohydrate-active enzyme annotation. Nucleic Acids Res. 46(W1):W95-W101 (2018)

What is claimed is:

1. A synthetic microbial consortium, comprising:
i. at least 1×10\hat{ }7 colony forming units of a first microbial entity comprising a probiotic microbial species, and
ii. at least 1×10\hat{ }7 colony forming units of a second microbial entity comprising a food-derived microbial isolate,
wherein the synthetic microbial consortium produces a synergistic functional interaction when grown together relative to each distinct microbial entity grown in isolation under the same conditions.

2. The synthetic microbial consortium of claim 1, wherein the first microbial entity is selected from the group consisting of: a Bacillus subtilis, a Lactiplantibacillus plantarum, a Lactobacillus acidophilus, a Lacticaseibacillus casei, a Lacticaseibacillus rhamnosus, a Lacticaseibacillus paracasei, a Lentilactobacillus buchneri, a Levilactobacillus brevis, a Bacillus licheniformis, a Weizmannia coagulans, a Saccharomyces cerevisiae, and a Saccharomyces boulardii.

3. The synthetic microbial consortium of claim 1, wherein the second microbial entity is selected from the group consisting of: Bacillus subtilis, Lactiplantibacillus plantarum, Bacillus endophyticus, Bacillus amyloliquefaciens, Bacillus safensis, Bacillus pumilus, Bacillus paralicheniformis, Bacillus amyloliquefaciens, Bacillus axarquiensis, Bacillus megaterium, Bacillus aryabhattai, Pichia membranifaciens, Pichia kudriavzevii, Pichia terricola, Saccharomyces cerevisiae, Saccharomyces boulardii, Kluyveromyces marxianus, Talaromyces atroroseus, Debaryomyces hansenii, Candida akabanensis, Candida dosseyi, Meyerozyma guilliermondii, Lentilactobacillus buchneri, Lacticaseibacillus casei, Lactobacillus acidophilus, Leuconostoc mesenteroides, Leuconostoc pseudomesenteroides, Schleiferilactobacillus harbinensis, Pediococcus parvulus, Pediococcus ethanolidurans, Pediococcus pentosaceus, Pediococcus paracasei, Galactomyces geotrichum, Nakazawaea ishiwadae, Streptococcus thermophilus, Weisella cibaria, Kazachstania servazzii, Pichia fermentans, and Holermanniella takashimae.

4. The synthetic microbial consortium of claim 1, wherein the synergistic functional interaction results in a two-fold or greater increased number of colony forming units produced of the first microbial entity alone or of the first and second microbial entities combined when the microbial entities are grown together, relative to the summed amount of colony forming units produced by growing an equivalent amount of each distinct microbial entity in isolation under the same culture conditions, and wherein:
a. the first microbial entity is Bacillus subtilis, and the second microbial entity is selected from the group consisting of: Lentilactobacillus buchneri, Pediococcus parvulus, Lacticaseibacillus casei, Pediococcus ethanolidurans, Leuconostoc mesenteroides, Lactiplantibacillus plantarum, Schleiferilactobacillus harbinensis, Pichia membranifaciens, Pichia kudriavzevii, Meyerozyma guilliermondii, Holermanniella takashimae, Lactobacillus acidophilus, Galactomyces geotrichum, Candida akabanensis, Nakazawaea ishiwadae, and Saccharomyces cerevisiae;
b. the first microbial entity is Lacticaseibacillus casei, and the second microbial entity is selected from the group consisting of: Bacillus endophyticus, Bacillus amyloliquefaciens, Bacillus subtilis, Pichia membranifaciens, Pichia kudriavzevii, Pichia fermentans, Bacillus safensis, Bacillus pumilus, and Bacillus paralicheniformis;
c. the first microbial entity is Lactiplantibacillus plantarum, and the second microbial entity is selected from the group consisting of: Bacillus safensis, Bacillus subtilis, Saccharomyces cerevisiae, Pichia kudriavzevii, Saccharomyces boulardii, and Kluyveromyces marxianus;
d. the first microbial entity is Lacticaseibacillus paracasei, and the second microbial entity is selected from Kluyveromyces marxianus and Saccharomyces boulardii;
e. the first microbial entity is Lacticaseibacillus rhamnosus, and the second microbial entity is Kluyveromyces marxianus;
f. the first microbial entity is Lentilactobacillus buchneri, and the second microbial entity is selected from the group consisting of: Bacillus subtilis, Bacillus amyloliquefaciens, Bacillus amyloliquefaciens, Bacillus safensis, Bacillus axarquiensis, Talaromyces atroroseus, Kluyveromyces marxianus and Saccharomyces boulardii;
g. the first microbial entity is Lentilactobacillus acidophilus, and the second microbial entity is selected from the group consisting of Bacillus axarquiensis, Bacillus amyloliquefaciens, Bacillus subtilis, and Saccharomyces boulardii;
h. the first microbial entity is Levilactobacillus brevis, and the second microbial entity is Holermanniella takashimae;
i. the first microbial entity is Bacillus licheniformis, and the second microbial entity is Schleiferilactobacillus harbinensis or Pediococcus ethanolidurans;
j. the first microbial entity is Saccharomyces cerevisiae, and the second microbial entity is selected from the group consisting of: Bacillus pumilus, Bacillus subtilis, Bacillus amyloliquefaciens Lactiplantibacillus plantarum, and Leuconostoc mesenteroides;
or
k. the first microbial entity is Saccharomyces boulardii, and the second microbial entity is selected from the group consisting of: Lentilactobacillus buchneri, Pediococcus ethanolidurans, Lactobacillus harbinensis, Lactiplantibacillus plantarum, Lactobacillus acidophilus, Exiguobacterium sp., Pediococcus paracasei, Pediococcus pentosaceus and Lacticaseibacillus paracasei.

5. The synthetic microbial consortium of claim 1, wherein the synergistic functional interaction is production of an increased amount of acetate when the microbial entities are grown together, relative to the summed amount of acetate produced by an equivalent amount of each microbial entity grown in isolation under the same conditions, and wherein:
a. the first microbial entity is Bacillus subtilis, and the second microbial entity is selected from the group consisting of: Leuconostoc pseudomesenteroides, Saccharomyces boulardii, Pediococcus ethanolidurans, Pediococcus pentosaceus, Lactiplantibacillus plantarum, Pichia membranifaciens, Pichia fermentans, Talaromyces atroroseus, Debaryomyces hansenii, Candida dosseyi, Streptococcus thermophilus, and Weisella cibaria;
b. the first microbial entity is Lacticaseibacillus casei, and the second microbial entity is selected from the group consisting of: Pichia membranifaciens, Pichia fermentans, Pichia kudriavzevii, Bacillus atrophaeus, and Bacillus licheniformis;
c. the first microbial entity is Lacticaseibacillus paracasei, and the second microbial entity is selected from the group consisting of: Bacillus subtilis, Bacillus amyloliquefaciens, Kluyveromyces marxianus, Bacillus atrophaeus, and Saccharomyces boulardii;
d. the first microbial entity is Lactiplantibacillus plantarum, and the second microbial entity is selected from the group consisting of: Saccharomyces bouldardii, Kluyveromyces marxianus, Bacillus subtilis, Holermanniella takashimae, Bacillus pumilus, Talaromyces atroroseus, and Pichia terricola;
e. the first microbial entity is Lentilactobacillus buchneri, and the second microbial entity is Saccharomyces boulardii or Kluyveromyces marxianus;
f. the first microbial entity is Lentilactobacillus acidophilus, and the second microbial entity is Talaramyces atroroseus or Bacillus amyloliquefaciens;
g. the first microbial entity is Lacticaseibacillus rhamnosus, and the second microbial entity is Saccharomyces boulardii or Talaromyces atroroseus;
h. the first microbial entity is Bacillus licheniformis, and the second microbial entity is Lacticaseibacillus casei;
i. the first microbial entity is Weizmannia coagulans, and the second microbial entity is Pichia fermentans or Saccharomyces cerevisiae;
j. the first microbial entity is Saccharomyces cerevisiae, and the second microbial entity is Lactococcus lactis or Bacillus amyloliquefaciens;
or
k. the first microbial entity is Saccharomyces boulardii, and the second microbial entity is selected from the group consisting of: Lentilactobacillus buchneri, Pediococcus ethanolidurans, Lacticaseibacillus rhamnosus, Pediococcus ethanolidurans, Lactiplantibacillus plantarum, Bacillus amyloliquefaciens, Bacillus subtilis, Bacillus amyloliquefaciens, and Bacillus aryabhattai.

6. The synthetic microbial consortium of claim 1, wherein the synergistic functional interaction is production of an increased amount of propionate when the microbial entities are grown together, relative to the summed amount of propionate produced by an equivalent amount of each microbial entity grown in isolation under the same conditions, and wherein:
a. the first microbial entity is Bacillus subtilis, and the second microbial entity is selected from the group consisting of: Pediococcus pentosaceus, Pichia membranifaciens, Holermanniella takashimae, Lacticaseibacillus casei, Lentilactobacillus buchneri, Lacticaseibacillus casei, and Debaryomyces hansenii;
b. the first microbial entity is Lacticaseibacillus casei, and the second microbial entity is Bacillus subtilis or Bacillus safensis;
c. the first microbial entity is Lentilactobacillus buchneri, and the second microbial entity is Bacillus subtilis or Bacillus amyloliquefaciens;
or
d. the first microbial entity is Saccharomyces boulardii, and the second microbial entity is Bacillus amyloliquefaciens.

7. The synthetic microbial consortium of claim 1, wherein the synergistic functional interaction is production of an increased amount of indole derivatives when the microbial entities are grown together, relative to the summed amount of indole derivatives produced by an equivalent amount of each microbial entity grown in isolation under the same conditions, and wherein:
a. the first microbial entity is Bacillus subtilis, and the second microbial entity is selected from the group consisting of: Kazachstania servazzii, Kluyveromyces marxianus, Leuconostoc mesenteroides, Pediococcus parvulus, Leuconostoc pseudomesenteroides, Lactiplantibacillus plantarum, Lactiplantibacillus casei, Lentilactobacillus buchneri, Pediococcus pentosaceus, Pichia fermentans, Pichia kudriavzevii, Galactomyces geotrichum, Clavispora sp., Holermanniella takashimae, Talaromyces atroroseus, Weisella cibaria, Debaryomyces hansenii, Candida dosseyi, Saccharomyces cerevisiae, Candida almanaticensis, and Nakazawaea ishiwadae;
b. the first microbial entity is Lacticaseibacillus casei, and the second microbial entity is selected from the group consisting of: Bacillus licheniformis, Bacillus paralicheniformis, Bacillus endophyticus, and Bacillus subtilis;
c. the first microbial entity is Lactiplantibacillus plantarum, and the second microbial entity is selected from the group consisting of: Bacillus licheniformis, Bacillus paralicheniformis, Bacillus mojavensis, and Bacillus subtilis;
d. the first microbial entity is Lentilactobacillus buchneri, and the second microbial entity is Bacillus axarquiensis or Bacillus subtilis;
e. the first microbial entity is Lentilactobacillus acidophilus, and the second microbial entity is selected from the group consisting of Candida akabanensis, Pichia terricola, Debaryomyces hansenii, and Candida dosseyi;
f. the first microbial entity is Levilactobacillus brevis, and the second microbial entity is Bacillus subtilis;
g. the first microbial entity is Bacillus licheniformis, and the second microbial entity is Lacticaseibacillus casei or Lactiplantibacillus plantarum;
or
h. the first microbial entity is Saccharomyces cerevisiae, and the second microbial entity is selected from the group consisting of Bacillus mojavensis, Bacillus subtilis, Bacillus amyloliquefaciens, and Bacillus megaterium.

8. The synthetic microbial consortium of claim 1, further comprising a prebiotic polysaccharide.

9. The synthetic microbial consortium of claim 8, wherein the prebiotic polysaccharide is oligofructose, fructooligosaccharide, or a plant extract.

10. The synthetic microbial consortium of claim 1, further comprising a cryoprotectant present in an effective amount to extend survival of the microbial entities during storage at a cryogenic temperature.

11. The synthetic microbial consortium of claim 1, wherein the synthetic microbial consortium is formulated as a dietary supplement.

12. The synthetic microbial consortium of claim 1, wherein the synthetic microbial consortium is formulated as a solid foodstuff.

13. The synthetic microbial consortium of claim 1, wherein the synthetic microbial consortium is formulated as a medical food.

14. The synthetic microbial consortium of claim 1, wherein the synthetic microbial consortium is formulated as a pharmaceutical composition.

15. The synthetic microbial consortium of claim 1, wherein the microbial entities are co-formulated in a unit dose formulated for oral administration.

16. The synthetic microbial consortium of claim 15, wherein the unit dose comprises between 1×10⁷ and 1×10¹² cfu/dose of each of the first microbial entity and the second microbial entity.

17. The synthetic microbial consortium of claim 1, wherein the first microbial entity and the second microbial entity increase immune health or produce an anti-inflammatory effect in a mammalian host.

18. A method for treating, preventing, reducing severity, or enabling dietary management of at least one symptom in a subject having an immune system disorder, comprising: administering an effective amount of the synthetic microbial consortium of claim 1 to the subject, thereby treating, preventing, reducing the severity, or enabling the dietary management of the at least one symptom in the subject.

19. The method of claim 18, wherein the immune system disorder is selected from allergic rhinitis, allergic conjunctivitis, allergic bronchial asthma, atopic eczema, anaphylaxis, insect sting, drug allergy, food allergy, asthma, eczema, ulcerative colitis, Crohn's disease, celiac disease, multiple sclerosis, psoriasis, psoriatic arthritis, and a disorder or condition associated with a pathological Th17 activity.

20. A synthetic microbial consortium, comprising:
i. a probiotic Bacillus subtilis, and
ii. a second microbial entity comprising a food-derived microbial isolate selected from the group consisting of a Saccharomyces cerevisiae, a Lacticaseibacillus casei, a Pediococcus ethanolidurans, a Pichia membranifaciens, and a Lactiplantibacillus plantarum,
wherein the synthetic microbial consortium produces a synergistic functional interaction comprising production of an increased amount of acetate when the microbial entities are grown together, relative to the summed amount of acetate produced by an equivalent amount of each microbial entity grown in isolation under the same conditions,
and wherein administering an effective dose of the synthetic microbial consortium to a mammalian subject produces an anti-inflammatory effect in a mammalian host.

The application's sequence listing, which the Patent Office published only in electronic form, follows.

SEQUENCE LISTING (1727 sequences)

SEQ ID NO: 1 - DNA, 1490 bp, Pseudomonas fluorescens
  source 1..1490: mol_type = genomic DNA; note = DP1; SBI189
agtcagacatgcaagtcgagcggtagagagaagcttgcttctcttgagagcggcggacgggtgagtaaagcctaggaatctgcctggtagtgggggataacgttcggaaacggacgctaataccgcatacgtcctacgggagaaagcaggggaccttcgggccttgcgctatcagatgagcctaggtcggattagctagttggtgaggtaatggctcaccaaggcgacgatccgtaactggtctgagaggatgatcagtcacactggaactgagacacggtccagactcctacgggaggcagcagtggggaatattggacaatgggcgaaagcctgatccagccatgccgcgtgtgtgaagaaggtcttcggattgtaaagcactttaagttgggaggaagggcattaacctaatacgttagtgttttgacgttaccgacagaataagcaccggctaactctgtgccagcagccgcggtaatacagagggtgcaagcgttaatcggaattactgggcgtaaagcgcgcgtaggtggtttgttaagttggatgtgaaatccccgggctcaacctgggaactgcattcaaaactgactgactagagtatggtagagggtggtggaatttcctgtgtagcggtgaaatgcgtagatataggaaggaacaccagtggcgaaggcgaccacctggactaatactgacactgaggtgcgaaagcgtggggagcaaacaggattagataccctggtagtccacgccgtaaacgatgtcaactagccgttgggagccttgagctcttagtggcgcagctaacgcattaagttgaccgcctggggagtacggccgcaaggttaaaactcaaatgaattgacgggggcccgcacaagcggtggagcatgtggtttaattcgaagcaacgcgaagaaccttaccaggccttgacatccaatgaactttctagagatagattggtgccttcgggaacattgagacaggtgctgcatggctgtcgtcagctcgtgtcgtgagatgttgggttaagtcccgtaacgagcgcaacccttgtccttagttaccagcacgtaatggtgggcactctaaggagactgccggtgacaaaccggaggaaggtggggatgacgtcaagtcatcatggcccttacggcctgggctacacacgtgctacaatggtcggtacagagggttgccaagccgcgaggtggagctaatcccataaaaccgatcgtagtccggatcgcagtctgcaactcgactgcgtgaagtcggaatcgctagtaatcgcgaatcagaatgtcgcggtgaatacgttcccgggccttgtacacaccgcccgtcacaccatgggagtgggttgcaccagaagtagctagtctaaccttcgggaggacggttaccacggtgtgattcatgactggggtgaagtcgtaacaaggtagccgtaggggaacctgcggctggatcacctcctt

SEQ ID NO: 2 - DNA, 1017 bp, Hanseniaspora occidentalis
  source 1..1017: mol_type = genomic DNA; note = DP2; SBI4261
ttgttgctcgagttcttgtttagatcttttacaataatgtgtatctttaatgaagatgngngcttaattgcgctgctttattagagtgtcgcagtagaagtagtcttgcttgaatctcagtcaacgtttacacacattggagtttttttactttaatttaattctttctgctttgaatcgaaaggttcaaggcaaaaaacaaacacaaacaattttattttattataattttttaaactaaaccaaaattcctaacggaaattttaaaataatttaaaactttcaacaacggatctcttggttctcgcatcgatgaaaaacgtaccgaattgcgataagtaatgtgaattgcaaatactcgtgaatcattgaatttttgaacgcacattgcgcccttgagcattctcaagggcatgcctgtttgagcgtcatttccttctcaaaaaataattttttattttttggttgtgggcgatactcagggttagcttgaaattggagactgtttcagtcttttttaattcaacacttancttctttggagacgctgttctcgctgtgatgtatttatggatttattcgttttactttacaagggaaatggtaatgtaccttaggcaaagggttgcttttaatattcatcaagtttgacctcaaatcaggtaggattacccgctgaacttaagcatatcaataagcggaggaaaagaaaccaactgggattaccttagtaacggcgagtgaagcggtaaaagctcaaatttgaaatctggtactttcagtgcccgagttgtaatttgtagaatttgtctttgattaggtccttgtctatgttccttggaacaggacgtcatagagggtgagantcccgtttgnngaggataccttttctctgtannactttttcnaagagtcgagttgnttgggaatgcagctcaaanngggtngnaaattccatctaaagctaaatattngncnagagaccganagcgacantacagngatggaaagangaaa

SEQ ID NO: 3 - DNA, 1548 bp, Leuconostoc mesenteroides
  source 1..1548: mol_type = genomic DNA; note = DP3; SBI534
attgagagtttgatcctggctcaggatgaacgctggcggcgtgcctaatacatgcaagtcgaacgcacagcgaaaggtgcttgcacctttcaagtgagtggcgaacgggtgagtaacacgtggacaacctgcctcaaggctggggataacatttggaaacagatgctaataccgaataaaactcagtgtcgcatgacacaaagttaaaaggcgctttggcgtcacctagagatggatccgcggtgcattagttagttggtggggtaaaggcctaccaagacaatgatgcatagccgagttgagagactgatcggccacattgggactgagacacggcccaaactcctacgggaggctgcagtagggaatcttccacaatgggcgaaagcctgatggagcaacgccgcgtgtgtgatgaaggctttcgggtcgtaaagcactgttgtacgggaagaacagctagaatagggaatgattttagtttgacggtaccataccagaaagggacggctaaatacgtgccagcagccgcggtaatacgtatgtcccgagcgttatccggatttattgggcgtaaagcgagcgcagacggttgattaagtctgatgtgaaagcccggagctcaactccggaatggcattggaaactggttaacttgagtgcagtagaggtaagtggaactccatgtgtagcggtggaatgcgtagatatatggaagaacaccagtggcgaaggcggcttactggactgtaactgacgttgaggctcgaaagtgtgggtagcaaacaggattagataccctggtagtccacaccgtaaacgatgaacactaggtgttaggaggtttccgcctcttagtgccgaagctaacgcattaagtgttccgcctggggagtacgaccgcaaggttgaaactcaaaggaattgacggggacccgcacaagcggtggagcatgtggtttaattcgaagcaacgcgaagaaccttaccaggtcttgacatcctttgaagcttttagagatagaagtgttctcttcggagacaaagtgacaggtggtgcatggtcgtcgtcagctcgtgtcgtgagatgttgggttaagtcccgcaacgagcgcaacccttattgttagttgccagcattcagatgggcactctagcgagactgccggtgacaaaccggaggaaggcggggacgacgtcagatcatcatgccccttatgacctgggctacacacgtgctacaatggcgtatacaacgagttgccaacccgcgagggtgagctaatctcttaaagtacgtctcagttcggattgtagtctgcaactcgactacatgaagtcggaatcgctagtaatcgcggatcagcacgccgcggtgaatacgttcccgggtcttgtacacaccgcccgtcacaccatgggagtttgtaatgcccaaagccggtggcctaaccttttaggaaggagccgtctaaggcaggacagatgactggggtgaagtcgtaacaaggtagccgtaggagaacctgcggctggatcacctccttt

SEQ ID NO: 4 - DNA, 1538 bp, Aureobasidium pullulans
  source 1..1538: mol_type = genomic DNA; note = DP4; SBI289
ttgaagagtttgatcatggctcagattgaacgctggcggcaggcctaacacatgcaagtcgagcggcagcggaaagtagcttgctactttgccggcgagcggcggacgggtgagtaatgtctgggaaactgcctgatggagggggataactactggaaacggtagctaataccgcatgacctcgaaagagcaaagtgggggatcttcggacctcacgccatcggatgtgcccagatgggattagctagtaggtgaggtaatggctcacctaggcgacgatccctagctggtctgagaggatgaccagccacactggaactgagacacggtccagactcctacgggaggcagcagtggggaatattgcacaatgggcgcaagcctgatgcagccatgccgcgtgtgtgaagaaggccttagggttgtaaagcactttcagcgaggaggaaggcatcatacttaatacgtgtggtgattgacgttactcgcagaagaagcaccggctaactccgtgccagcagccgcggtaatacggagggtgcaagcgttaatcggaattactgggcgtaaagcgcacgcaggcggtttgttaagtcagatgtgaaatccccgcgcttaacgtgggaactgcatttgaaactggcaagctagagtcttgtagaggggggtagaattccaggtgtagcggtgaaatgcgtagagatctggaggaataccggtggcgaaggcggccccctggacaaagactgacgctcaggtgcgaaagcgtggggagcaaacaggattagataccctggtagtccacgccgtaaacgatgtcgacttggaggttgttcccttgaggagtggcttccggagctaacgcgttaagtcgaccgcctggggagtacggccgcaaggttaaaactcaaatgaattgacgggggcccgcacaagcggtggagcatgtggtttaattcgatgcaacgcgaagaaccttacctactcttgacatccacggaatttggcagagatgccttagtgccttcgggaaccgtgagacaggtgctgcatggctgtcgtcagctcgtgttgtgaaatgttgggttaagtcccgcaacgagcgcaacccttatcctttgttgccagcgattcggtcgggaactcaaaggagactgccggtgataaaccggaggaaggtggggatgacgtcaagtcatcatggcccttacgagtagggctacacacgtgctacaatggcgcatacaaagagaagcgacctcgcgagagcaagcggacctcacaaagtgcgtcgtagtccggatcggagtctgcaactcgactccgtgaagtcggaatcgctagtaatcgtggatcagaatgccacggtgaatacgttcccgggccttgtacacaccgcccgtcacaccatgggagtgggttgcaaaagaagtaggtagcttaaccttcgggagggcgcttaccactttgtgattcatgactggggtgaagtcgtaacaaggtaaccgtaggggaacctgcggttggatcacctcctt

SEQ ID NO: 5 - DNA, 1042 bp, Debaromyces hansenii
  source 1..1042: mol_type = genomic DNA; note = DP5; SBI319
gcgcttattgcgcggcgaaaaaaccttacacacagtgttttttgttattacannaacttttgctttggtctggactagaaatagtttgggccagaggttactaaactaaacttcaatatttatattgaattgttatttatttaattgtcaatttgttgattaaattcaaaaaatcttcaaaactttcaacaacggatctcttggttctcgcatcgatgaagaacgcagcgaaatgcgataagtaatatgaattgcagattttcgtgaatcatcgaatctttgaacgcacattgcgccctctggtattccagagggcatgcctgtttgagcgtcatttctctctcaaaccttcgggtttggtattgagtgatactcttagtcgaactaggcgtttgcttgaaatgtattggcatgagtggtactggatagtgctatatgactttcaatgtattaggtttatccaactcgttgaatagtttaatggtatatttctcggtattctaggctcggccttacaatataacaaacaagtttgacctcaaatcaggtaggattacccgctgaacttaagcatatcaataagcggaggaaaagaaaccaacagggattgccttagtaacggcgagtgaagcggcaaaagctcaaatttgaaatctggcaccttcggtgtccgagttgtaatttgaagaaggtaactttggagttggctcttgtctatgttccttggaacaggacgtcacagagggtgagaatcccgtgcgatgagatgcccaattctatgtaaagtgctttcgaagagtcgagttgtttgggaatgcagctctaagtgggtggtaaattccatctaaagctaaatattggcgagagaccgatagcgaacaagtacagtgatggaaagatgaaaagaactttgaaaagagagtgaaaaagtacgtgaaattgttgaaagggaaagggcttgagatcagacttggtattttgcgatcctttccttcttggttgggttcctcgcagcttactgggncagcatcggtttggatgg

SEQ ID NO: 6 - DNA, 1165 bp, Bacillus cereus
  source 1..1165: mol_type = genomic DNA; note = DP6; SBI548
gaaaggcggcttcggctgtcacttatggatggacccgcgtcgcattagctagttggtgaggtaacggctcaccaaggcaacgatgcgtagccgacctgagagggtgatcggccacactgggactgagacacggcccagactcctacgggaggcagcagtagggaatcttccgcaatggacgaaagtctgacggagcaacgccgcgtgagtgatgaaggctttcgggtcgtaaaactctgttgttagggaagaacaagtgctagttgaataagctgcaccttgacggtacctaaccagaaagccacggctaactacgtgccagcagccgcggtaatacgtaggtggcaagcgttatccggaattattgggcgtaaagcgcgcgcaggtggtttcttaagtctgatgtgaaagcccacggctcaaccgtggagggtcattggaaactgggagacttgagtgcagaagaggaaagtggaattccatgtgtagcggtgaaatgcgtagagatatggaggaacaccagtggcgaaggcgactttctggtctgtaactgacactgaggcgcgaaagcgtggggagcaaacaggattagataccctggtagtccacgccgtaaacgatgagtgctaagtgttagagggtttccgccctttagtgctgaagttaacgcattaagcactccgcctggggagtacggccgcaaggctgaaactcaaaggaattgacgggggcccgcacaagcggtggagcatgtggtttaattcgaagcaacgcgaagaaccttaccaggtcttgacatcctctgaaaaccctagagatagggcttctccttcgggagcagagtgacaggtggtgcatggttgtcgtcagctcgtgtcgtgagatgttgggttaagtcccgcaacgagcgcaacccttgatcttagttgccatcattaagttgggcactctaaggtgactgccggtgacaaaccggaggaaggtggggatgacgtcaaatcatcatgccccttatgacctgggctacacacgtgctacaatggacggtacaaagagctgcaagaccgcgaggtggagctaatctcataaaaccgttctcagttcggattgtaggctgcaactcgcctacatgaagctggaatcgctagtaatcgcggatcagcat

SEQ ID NO: 7 - DNA, 871 bp, Pichia fermentans
  source 1..871: mol_type = genomic DNA; note = DP7; SBI817
ccacnctgcgtgggcgacacgaaacaccgaaaccgaacgcacgccgtcaagcaagaaatccacaaaactttcaacaacggatctcttggttctcgcatcgatgaagagcgcagcgaaatgcgatacctagtgtgaattgcagccatcgtgaatcatcgagttcttgaacgcacattgcgcccgctggtattccggcgggcatgcctgtctgagcgtcgtttccttcttggagcggagcttcagacctggcgggctgtctttcgggacggcgcgcccaaagcgaggggccttctgcgcgaactagactgtgcgcgcggggcggccggcgaacttataccaagctcgacctcagatcaggcaggagtacccgctgaacttaagcatatcaataagcggaggaaaagaaaccaacagggattgccccagtagcggcgagtgaagcggcaaaagctcagatttggaatcgcttcggcgagttgtgaattgcaggttggcgcctctgcggcggcggcggtccaagtcccttggaacagggcgccattgagggtgagagccccgtgggaccgtttgcctatgctctgaggcccttctgacgagtcgagttgtttgggaatgcagctctaagcgggtggtaaattccatctaaggctaaatactggcgagagaccgatagcgaacaagtactgtgaaggaaagatgaaaagcactttgaaaagagagtgaaacagcacgtgaaattgttgaaagggaagggtattgcgcccgacatggagcgtgcgcaccgctgcccctcgtgggcggcgctctgggcgtgctctgggccagcatcggtttttgccgcgggagaagggcggcgggcatgtagctcttc

SEQ ID NO: 8 - DNA, 942 bp, Hanseniaspora opuntiae
  source 1..942: mol_type = genomic DNA; note = DP8; SBI1485
gttgctcgagttcttgtttagatcttttacnataatgtgtatctttaatgaagatgtgcgcttaattgcgctgctttattagagtgtcgcagtagaagtagtcttgcttgaatctcagtcaacgtttacacacattggagtttttttactttaatttaattctttctgctttgaatcgaaaggttcaaggcaaaaaacaaacacaaacaattttattttattataattttttaaactaaaccaaaattcctaacggaaattttaaaataatttaaaactttcaacaacggatctcttggttctcgcatcgatgaaaaacgtagcgaattgcgataagtaatgtgaattgcaaatactcgtgaatcattgaatttttgaacgcacattgcgcccttgagcattctcaagggcatgcctgtttgagcgtcatttccttctcaaaagataattttttattttttggttgtgggcgatactcagggttagcttgaaattggagactgtttcagtcttttttaattcaacacttancttctttggagacgctgttctcgctgtgatgtatttatggatttattcgttttactttacaagggaaatggtaatgtaccttaggcaaagggttgcttttaatattcatcaagtttgacctcaaatcaggtaggattacccgctgaacttaagcatatcaataagcggaggaaaagaaaccaactgggattaccttagtaacggcgagtgaagcggtaaaagctcaaatttgaaatctggtactttcanngcccgagttgtaatttgtagaatttgtctttgattaggtccttgtctatgttccttggancaggacgtcatanagggtgantcccntttggcganganaccttttctctgtanactttttcnanagtcgagttgtttnggatgcagctcnaagtggggngg

SEQ ID NO: 9 - DNA, 1572 bp, Pediococcus pentosaceus
  source 1..1572: mol_type = genomic DNA; note = DP9; SBI2335
atgagagtttgatcttggctcaggatgaacgctggcggcgtgcctaatacatgcaagtcgaacgaacttccgttaattgattatgacgtacttgtactgattgagattttaacacgaagtgagtggcgaacgggtgagtaacacgtgggtaacctgcccagaagtaggggataacacctggaaacagatgctaataccgtataacagagaaaaccgcatggttttcttttaaaagatggctctgctatcacttctggatggacccgcggcgtattagctagttggtgaggcaaaggctcaccaaggcagtgatacgtagccgacctgagagggtaatcggccacattgggactgagacacggcccagactcctacgggaggcagcagtagggaatcttccacaatggacgcaagtctgatggagcaacgccgcgtgagtgaagaagggtttcggctcgtaaagctctgttgttaaagaagaacgtgggtaagagtaactgtttacccagtgacggtatttaaccagaaagccacggctaactacgtgccagcagccgcggtaatacgtaggtggcaagcgttatccggatttattgggcgtaaagcgagcgcaggcggtcttttaagtctaatgtgaaagccttcggctcaaccgaagaagtgcattggaaactgggagacttgagtgcagaagaggacagtggaactccatgtgtagcggtgaaatgcgtagatatatggaagaacaccagtggcgaaggcggctgtctggtctgcaactgacgctgaggctcgaaagcatgggtagcgaacaggattagataccctggtagtccatgccgtaaacgatgattactaagtgttggagggtttccgcccttcagtgctgcagctaacgcattaagtaatccgcctggggagtacgaccgcaaggttgaaactcaaaagaattgacgggggcccgcacaagcggtggagcatgtggtttaattcgaagctacgcgaagaaccttaccaggtcttgacatcttctgacagtctaagagattagaggttcccttcggggacagaatgacaggtggtgcatggttgtcgtcagctcgtgtcgtgagatgttgggttaagtcccgcaacgagcgcaacccttattactagttgccagcattaagttgggcactctagtgagactgccggtgacaaaccggaggaaggtggggacgacgtcaaatcatcatgccccttatgacctgggctacacacgtgctacaatggatggtacaacgagtcgcgagaccgcgaggttaagctaatctcttaaaaccattctcagttcggactgtaggctgcaactcgcctacacgaagtcggaatcgctagtaatcgcggatcagcatgccgcggtgaatacgttcccgggccttgtacacaccgcccgtcacaccatgagagtttgtaacacccaaagccggtggggtaaccttttaggagctagccgtctaaggtgggacagatgattagggtgaagtcgtaacaaggtagccgtaggagaacctgcggctggatcacctcctt

SEQ ID NO: 10 - DNA, 1300 bp, Bacillus velezensis
  source 1..1300: mol_type = genomic DNA; note = DP10; SBI366
cagatagttggtgaggtaacggctcaccaaggcaacgatgcgtagccgacctgagagggtgatcggccacactgggactgagacacggcccagactcctacgggaggcagcagtagggaatcttccgcaatggacgaaagtctgacggagcaacgccgcgtgagtgatgaaggttttcggatcgtaaagctctgttgttagggaagaacaagtgccgttcaaatagggcggcaccttgacggtacctaaccagaaagccacggctaactacgtgccagcagccgcggtaatacgtaggtggcaagcgttgtccggaattattgggcgtaaagggctcgcaggcggtttcttaagtctgatgtgaaagcccccggctcaaccggggagggtcattggaaactggggaacttgagtgcagaagaggagagtggaattccacgtgtagcggtgaaatgcgtagagatgtggaggaacaccagtggcgaaggcgactctctggtctgtaactgacgctgaggagcgaaagcgtggggagcgaacaggattagataccctggtagtccacgccgtaaacgatgagtgctaagtgttagggggtttccgccccttagtgctgcagctaacgcattaagcactccgcctggggagtacggtcgcaagactgaaactcaaaggaattgacgggggcccgcacaagcggtggagcatgtggtttaattcgaagcaacgcgaagaaccttaccaggtcttgacatcctctgacaatcctagagataggacgtccccttcgggggcagagtgacaggtggtgcatggttgtcgtcagctcgtgtcgtgagatgttgggttaagtcccgcaacgagcgcaacccttgatcttagttgccagcattcagttgggcactctaaggtgactgccggtgacaaaccggaggaaggtggggatgacgtcaaatcatcatgccccttatgacctgggctacacacgtgctacaatggacagaacaaagggcagcgaaaccgcgaggttaagccaatcccacaaatctgttctcagttcggatcgcagtctgcaactcgactgcgtgaagctggaatcgctagtaatcgcggatcagcatgccgcggtgaatacgttcccgggccttgtacacaccgcccgtcacaccacgagagtttgtaacacccgaagtcggtgaggtaaccttttaggagccagccgccgaaggtgggacagatgattggggtgaagtcgtaacaaggtagccgtatcggaaggtgcggctggatcacctccttt

SEQ ID NO: 11 - DNA, 1419 bp, Pseudomonas putida
  source 1..1419: mol_type = genomic DNA; note = DP11; SBI3299
tgaagagtttgatcatggctcagattgaacgctggcggcaggcctaacacatgcaagtcgagcggtagagagaagcttgcttctcttgagagcggcggacgggtgagtaatgcctaggaatctgcctggtagtgggggataacgttcggaaacggacgctaataccgcatacgtcctacgggagaaagcaggggaccttcgggccttgcgctatcagatgagcctaggtcggattagctagttggtgaggtaatggctcaccaaggcgacgatccgtaactggtctgagaggatgatcagtcacactggaactgagacacggtccagactcctacgggaggcagcagtggggaatattggacaatgggcgaaagcctgatccagccatgccgcgtgtgtgaagaaggtcttcggattgtaaagcactttaagttgggaggaagggttgtagattaatactctgcaattttgacgttaccgacagaataagcaccggctaactctgtgccagcagccgcggtaatacagagggtgcaagcgttaatcggaattactgggcgtaaagcgcgcgtaggtggttcgttaagttggatgtgaaagccccgggctcaacctgggaactgcattcaaaactgacgagctagagtatggtagagggtggtggaatttcctgtgtagcggtgaaatgcgtagatataggaaggaacaccagtggcgaaggcgaccacctggactgatactgacactgaggtgcgaaagcgtggggagcaaacaggattagataccctggtagtccacgccgtaaacgatgtcaactagccgttggaatccttgagattttagtggcgcagctaacgcattaagttgaccgcctggggagtacggccgcaaggttaaaactcaaatgaattgacgggggcccgcacaagcggtggagcatgtggtttaattcgaagcaacgcgaagaaccttaccaggccttgacatccaatgaactttccagagatggatgggtgccttcgggaacattgagacaggtgctgcatggctgtcgtcagctcgtgtcgtgagatgttgggttaagtcccgtaacgagcgcaacccttgtccttagttaccagcacgttatggtgggcactctaaggagactgccggtgacaaaccggaggaaggtggggatgacgtcaagtcatcatggcccttacggcctgggctacacacgtgctacaatggtcggtacaaagggttgccaagccgcgaggtggagctaatcccataaaaccgatcgtagtccggatcgcagtctgcaactcgactgcgtgaagtcggaatcgctagtaatcgcgaatcagaatgtcgcggtgaatacgttcccgggccttgtacacaccgcccgtcacatcccacacgaattgcttg

SEQ ID NO: 12 - DNA, 1520 bp, Microbacterium sp.
  source 1..1520: mol_type = genomic DNA; note = DP12; SBI3300
tacggagagtttgatcctggctcaggatgaacgctggcggcgtgcttaacacatgcaagtcgaacggtgaagccaagcttgcttggtggatcagtggcgaacgggtgagtaacacgtgagcaacctgccctggactctgggataagcgctggaaacggcgtctaatactggatatgagccttcatcgcatggtgggggttggaaagattttttggtctgggatgggctcgcggcctatcagcttgttggtgaggtaatggctcaccaaggcgtcgacgggtagccggcctgagagggtgaccggccacactgggactgagacacggcccagactcctacgggaggcagcagtggggaatattgcacaatgggcgaaagcctgatgcagcaacgccgcgtgagggatgacggccttcgggttgtaaacctcttttagcagggaagaagcgaaagtgacggtacctgcagaaaaagcgccggctaactacgtgccagcagccgcggtaatacgtagggcgcaagcgttatccggaattattgggcgtaaagagctcgtaggcggtttgtcgcgtctgctgtgaaatcccgaggctcaacctcgggcctgcagtgggtacgggcagactagagtgcggtaggggagattggaattcctggtgtagcggtggaatgcgcagatatcaggaggaacaccgatggcgaaggcagatctctgggccgtaactgacgctgaggagcgaaagggtggggagcaaacaggcttagataccctggtagtccaccccgtaaacgttgggaactagttgtggggaccattccacggtttccgtgacgcagctaacgcattaagttccccgcctggggagtacggccgcaaggctaaaactcaaaggaattgacggggacccgcacaagcggcggagcatgcggattaattcgatgcaacgcgaagaaccttaccaaggcttgacatacaccagaacgggccagaaatggtcaactctttggacactggtgaacaggtggtgcatggttgtcgtcagctcgtgtcgtgagatgttgggttaagtcccgcaacgagcgcaaccctcgttctatgttgccagcacgtaatggtgggaactcatgggatactgccggggtcaactcggaggaaggtggggatgacgtcaaatcatcatgccccttatgtcttgggcttcacgcatgctacaatggccggtacaaagggctgcaataccgtgaggtggagcgaatcccaaaaagccggtcccagttcggattgaggtctgcaactcgacctcatgaagtcggagtcgctagtaatcgcagatcagcaacgctgcggtgaatacgttcccgggtcttgtacacaccgcccgtcaagtcatgaaagtcggtaacacctgaagccggtggcccaacccttgtggagggagccgtcgaaggtgggatcggtaattaggactaagtcgtaacaaggtagccgtaccggaaggtgcggctggatcacctccttt

SEQ ID NO: 13 - DNA, 1457 bp, Bacillus mycoides
  source 1..1457: mol_type = genomic DNA; note = DP13; SBI3301
agttagcggcggacgggtgagtaacacgtgggtaacctgcctataagactgggataactccgggaaaccggggctaataccggataacattttgcaccgcatggtgcgaaattgaaaggcggcttcggctgtcacttatagatggacctgcggcgcattagctagttggtgaggtaacggctcaccaaggcgacgatgcgtagccgacctgagagggtgatcggccacactgggactgagacacggcccagactcctacgggaggcagcagtagggaatcttccgcaatggacgaaagtctgacggagcaacgccgcgtgaacgatgaaggctttcgggtcgtaaagttctgttgttagggaagaacaagtgctagttgaataagctggcaccttgacggtacctaaccagaaagccacggctaactacgtgccagcagccgcggtaatacgtaggtggcaagcgttatccggaattattgggcgtaaagcgcgcgcaggtggtttcttaagtctgatgtgaaagcccacggctcaaccgtggagggtcattggaaactgggagacttgagtgcagaagaggaaagtggaattccatgtgtagcggtgaaatgcgtagagatatggaggaacaccagtggcgaaggcgactttctggtctgcaactgacactgaggcgcgaaagcgtggggagcaaacaggattagataccctggtagtccacgccgtaaacgatgagtgctaagtgttagagggtttccgccctttagtgctgaagttaacgcattaagcactccgcctggggagtacggccgcaaggctgaaactcaaaggaattgacgggggcccgcacaagcggtggagcatgtggtttaattcgaagcaacgcgaagaaccttaccaggtcttgacatcctctgaaaaccctagagatagggcttccccttcgggggcagagtgacaggtggtgcatggttgtcgtcagctcgtgtcgtgagatgttgggttaagtcccgcaacgagcgcaacccttgatcttagttgccatcattaagttgggcactctaaggtgactgccggtgacaaaccggaggaaggtggggatgacgtcaaatcatcatgccccttatgacctgggctacacacgtgctacaatggacggtacaaagagtcgcaagaccgcgaggtggagctaatctcataaaaccgttctcagttcggattgtaggctgcaactcgcctacatgaagctggaatcgctagtaatcgcggatcagcatgccgcggtgaatacgttcccgggccttgtacacaccgcccgtcacaccacgagagtttgtaacacccgaagtcggtggggtaaccttttggagccagccgcctaaggtgggacagatgattggggtgaagtcgtaacaaggtagccgtatcggaaggtgcggctggatcacctccttt

SEQ ID NO: 14 - DNA, 1526 bp, Arthrobacter luteolus
  source 1..1526: mol_type = genomic DNA; note = DP14; SBI3302
tacggagagtttgatcctggctcaggatgaacgctggcggcgtgcttaacacatgcaagtcgaacgatgacttctgtgcttgcacagaatgattagtggcgaacgggtgagtaacacgtgagtaacctgcccttaacttcgggataagcctgggaaaccgggtctaataccggatacgacctcctggcgcatgccatggtggtggaaagctttagcggttttggatggactcgcggcctatcagcttgttggttggggtaatggcccaccaaggcgacgacgggtagccggcctgagagggtgaccggccacactgggactgagacacggcccagactcctacgggaggcagcagtggggaatattgcacaatgggcgaaagcctgatgcagcgacgccgcgtgagggatgacggccttcgggttgtaaacctctttcagcagggaagaagcgaaagtgacggtacctgcagaagaagcgccggctaactacgtgccagcagccgcggtaatacgtagggcgcaagcgttatccggaattattgggcgtaaagagctcgtaggcggtttgtcgcgtctgctgtgaaagcccggggctcaaccccgggtctgcagtgggtacgggcagactagagtgcagtaggggagactggaattcctggtgtagcggtgaaatgcgcagatatcaggaggaacaccgatggcgaaggcaggtctctgggctgtaactgacgctgaggagcgaaagcatggggagcgaacaggattagataccctggtagtccatgccgtaaacgttgggcactaggtgtgggggacattccacgttttccgcgccgtagctaacgcattaagtgccccgcctggggagtacggccgcaaggctaaaactcaaaggaattgacgggggcccgcacaagcggcggagcatgcggattaattcgatgcaacgcgaagaaccttaccaaggcttgacatgaaccggtaagacctggaaacaggtcccccacttgtggccggtttacaggtggtgcatggttgtcgtcagctcgtgtcgtgagatgttgggttaagtcccgcaacgagcgcaaccctcgttctatgttgccagcgggttatgccggggactcataggagactgccggggtcaactcggaggaaggtggggacgacgtcaaatcatcatgccccttatgtcttgggcttcacgcatgctacaatggccggtacaaagggttgcgatactgtgaggtggagctaatcccaaaaagccggtctcagttcggattgaggtctgcaactcgacctcatgaagttggagtcgctagtaatcgcagatcagcaacgctgcggtgaatacgttcccgggccttgtacacaccgcccgtcaagtcacgaaagttggtaacacccgaagccggtggcctaaccccttgtgggagggagccgtcgaaggtgggaccggcgattgggactaagtcgtaacaaggtagccgtaccggaaggtgcggctggatcacctccttt

SEQ ID NO: 15 - DNA, 1520 bp, Curtobacterium sp.
  source 1..1520: mol_type = genomic DNA; note = DP15; SBI3303
tacggagagtttgatcctggctcaggacgaacgctggcggcgtgcttaacacatgcaagtcgaacgatgatcaggagcttgctcctgtgattagtggcgaacgggtgagtaacacgtgagtaacctgcccctgactctgggataagcgttggaaacgacgtctaatactggatatgatcactggccgcatggtctggtggtggaaagattttttggttggggatggactcgcggcctatcagcttgttggtgaggtaatggctcaccaaggcgacgacgggtagccggcctgagagggtgaccggccacactgggactgagacacggcccagactcctacgggaggcagcagtggggaatattgcacaatgggcgaaagcctgatgcagcaacgccgcgtgagggatgacggccttcgggttgtaaacctcttttagtagggaagaagcgaaagtgacggtacctgcagaaaaagcaccggctaactacgtgccagcagccgcggtaatacgtagggtgcaagcgttgtccggaattattgggcgtaaagagctcgtaggcggtttgtcgcgtctgctgtgaaatcccgaggctcaacctcgggcttgcagtgggtacgggcagactagagtgcggtaggggagattggaattcctggtgtagcggtggaatgcgcagatatcaggaggaacaccgatggcgaaggcagatctctgggccgtaactgacgctgaggagcgaaagcgtggggagcgaacaggattagataccctggtagtccacgccgtaaacgttgggcgctagatgtagggacctttccacggtttctgtgtcgtagctaacgcattaagcgccccgcctggggagtacggccgcaaggctaaaactcaaaggaattgacgggggcccgcacaagcggcggagcatgcggattaattcgatgcaacgcgaagaaccttaccaaggcttgacatacaccggaaacggccagagatggtcgcccccttgtggtcggtgtacaggtggtgcatggttgtcgtcagctcgtgtcgtgagatgttgggttaagtcccgcaacgagcgcaaccctcgttctatgttgccagcgcgttatggcggggactcataggagactgccggggtcaactcggaggaaggtggggatgacgtcaaatcatcatgccccttatgtcttgggcttcacgcatgctacaatggccggtacaaagggctgcgataccgtaaggtggagcgaatcccaaaaagccggtctcagttcggattgaggtctgcaactcgacctcatgaagtcggagtcgctagtaatcgcagatcagcaacgctgcggtgaatacgttcccgggccttgtacacaccgcccgtcaagtcatgaaagtcggtaacacccgaagccggtggcctaacccttgtggaaggagccgtcgaaggtgggatcggtgattaggactaagtcgtaacaaggtagccgtaccggaaggtgcggctggatcacctccttt

SEQ ID NO: 16 - DNA, 1368 bp, Cryptococcus laurentii
  source 1..1368: mol_type = genomic DNA; note = DP16; SBI3304
gcacttcatcgtggtgcaccgtgaagggtctttgggcgttttacacatgcaagcaagtgttctataatttaggttatggaacagccaaatggtcagtacagctcagtcctaggcgatggactccgtaaaacggggacagactatcctttaataattaataggtttattatttcaataataatctctaggaagggatatacatatatccttattagtctaaaggttaataaaccgccttagtcaggactgagttctcaacagctacgggttaaaccccaggcaacgacgagtaggggatagtgatagctacaaccccgacactggccgcaagccagggtacttaagtacgcagcagtgaagaatcctcggcaatgcatcgcaattaccggtgacccaatataaaataatatcagggaggtagtaggtgtgaccgggtgacccaaagacgagtagtgacataagttattattcgcgtatgtcgaacatgatagtgacgtgttcaacatcaagccccgtccaacctctgtgccagcagtcgcggtaaaacaggaggggcagctcttatggtcatgaatgggcgtatagggcacgcagccagttagtaaaagcttgaatatttatttttttaaaaagaatgtttgagaggctatgagtttttataaagtgtacccacgacaccagacttagggctgagatcctatgaagtctgggggcggtcctttagggtgcattgtaaaaactgacggtaaggtgcgacagctgggataccgaagcggagtagagcccgcctagccccagccgtaaacgataggggccgttgttgactacggttttcaataaggctaacgcctgagcccctcgcctgtagggtatagccgcaaggccgacatattaacgatgagaccgctggtgagcaaacgggtgcggggcatgctgttcaatcagacagtacgctgacaaccttaccactccttgaatcttttagattatatttctaaaatgacaggtgctgcatggccgtcgtcagttcgtggtcgtgagtcgtccggttgagtccatgaacgaacgcagacccgtctgtatactcagtgaaaagaaatttagctgaactatacagttgtacttctataaaaggtacctgtacgggattatgacaggtcgtcatggcctttatggagtgggctacaggcgtgccacacgagccgttttaacgagttcctcatttttatgaataaggtctcttaatcacggctagtatacggatcgtaggctgtaactcgcctacgtgaagtcggagtcccgagtaatcgccgatcatcacgcggcggtgaatctacactctcactggggtactaaccgctcgtcacg

SEQ ID NO: 17 - DNA, 898 bp, Rahnella aquatilis
  source 1..898: mol_type = genomic DNA; note = DP17; SBI3306
gtgattgacgttactcgcagaagaagcaccggctaactccgtgccagcagccgcggtaatacggagggtgcaagcgttaatcggaattactgggcgtaaagcgcacgcaggcggtttgttaagtcagatgtgaaatccccgcgcttaacgtgggaactgcatttgaaactggcaagctagagtcttgtagaggggggtagaattccaggtgtagcggtgaaatgcgtagagatctggaggaataccggtggcgaaggcggccccctggacaaagactgacgctcaggtgcgaaagcgtggggagcaaacaggattagataccctggtagtccacgctgtaaacgatgtcgacttggaggttgtgcccttgaggcgtggcttccggagctaacgcgttaagtcgaccgcctggggagtacggccgcaaggttaaaactcaaatgaattgacgggggcccgcacaagcggtggagcatgtggtttaattcgatgcaacgcgaagaaccttacctactcttgacatccacggaattcgccagagatggcttagtgccttcgggaaccgtgagacaggtgctgcatggctgtcgtcagctcgtgttgtgaaatgttgggttaagtcccgcaacgagcgcaacccttatcctttgttgccagcacgtaatggtgggaactcaaaggagactgccggtgataaaccggaggaaggtggggatgacgtcaagtcatcatggcccttacgagtagggctacacacgtgctacaatggcatatacaaagagaagcgaactcgcgagagcaagcggacctcataaagtatgtcgtagtccggattggagtctgcaactcgactccatgaagtcggaatcgctagtaatcgtagatcagaatgctacgg

SEQ ID NO: 18 - DNA, 1532 bp, Pseudomonas sp.
  source 1..1532: mol_type = genomic DNA; note = DP18; SBI3307
tgaagagtttgatcatggctcagattgaacgctggcggcaggcctaacacatgcaagtcgagcggatgaaaggagcttgctcctggattcagcggcggacgggtgagtaatgcctaggaatctgcctggtagtgggggacaacgtttcgaaaggaacgctaataccgcatacgtcctacgggagaaagcaggggaccttcgggccttgcgctatcagatgagcctaggtcggattagctagttggtgaggtaatggctcaccaaggcgacgatccgtaactggtctgagaggatgatcagtcacactggaactgagacacggtccagactcctacgggaggcagcagtggggaatattggacaatgggcgaaagcctgatccagccatgccgcgtgtgtgaagaaggtcttcggattgtaaagcactttaagttgggaggaagggcagtaaattaatactttgctgttttgacgttaccgacagaataagcaccggctaactctgtgccagcagccgcggtaatacagagggtgcaagcgttaatcggaattactgggcgtaaagcgcgcgtaggtggtttgttaagttgaatgtgaaatccccgggctcaacctgggaactgcatccaaaactggcaagctagagtatggtagagggtggtggaatttcctgtgtagcggtgaaatgcgtagatataggaaggaacaccagtggcgaaggcgaccacctggactgatactgacactgaggtgcgaaagcgtggggagcaaacaggattagataccctggtagtccacgccgtaaacgatgtcaactagccgttgggagccttgagctcttagtggcgcagctaacgcattaagttgaccgcctggggagtacggccgcaaggttaaaactcaaatgaattgacgggggcccgcacaagcggtggagcatgtggtttaattcgaagcaacgcgaagaaccttaccaggccttgacatccaatgaactttccagagatggattggtgccttcgggaacattgagacaggtgctgcatggctgtcgtcagctcgtgtcgtgagatgttgggttaagtcccgtaacgagcgcaacccttgtccttagttaccagcacgttatggtgggcactctaaggagactgccggtgacaaaccggaggaaggtggggatgacgtcaagtcatcatggcccttacggcctgggctacacacgtgctacaatggtcggtacaaagggttgccaagccgcgaggtggagctaatcccataaaaccgatcgtagtccggatcgcagtctgcaactcgactgcgtgaagtcggaatcgctagtaatcgcgaatcagaatgtcgcggtgaatacgttcccgggccttgtacacaccgcccgtcacaccatgggagtgggttgcaccagaagtagctagtctaaccttcgggaggacggttaccacggtgtgattcatgactggggtgaagtcgtaacaaggtagccgtaggggaacctgcggctggatcacctcctt

SEQ ID NO: 19 - DNA, 1520 bp, Curtobacterium pusillum
  source 1..1520: mol_type = genomic DNA; note = DP19; SBI4260
tacggagagtttgatcctggctcaggacgaacgctggcggcgtgcttaacacatgcaagtcgaacgatgatgcccagcttgctgggtggattagtggcgaacgggtgagtaacacgtgagtaacctgcccctgactctgggataagcgttggaaacgacgtctaatactggatacgactgccggccgcatggtctggtggtggaaagattttttggttggggatggactcgcggcctatcagcttgttggtgaggtaatggctcaccaaggcgacgacgggtagccggcctgagagggtgaccggccacactgggactgagacacggcccagactcctacgggaggcagcagtggggaatattgcacaatgggcgaaagcctgatgcagcaacgccgcgtgagggatgacggccttcgggttgtaaacctcttttagtagggaagaagcgaaagtgacggtacctgcagaaaaagcaccggctaactacgtgccagcagccgcggtaatacgtagggtgcaagcgttgtccggaattattgggcgtaaagagctcgtaggcggtttgtcgcgtctgctgtgaaatcccgaggctcaacctcgggcttgcagtgggtacgggcagactagagtgcggtaggggagattggaattcctggtgtagcggtggaatgcgcagatatcaggaggaacaccgatggcgaaggcagatctctgggccgtaactgacgctgaggagcgaaagcgtggggagcgaacaggattagataccctggtagtccacgccgtaaacgttgggcgctagatgtagggacctttccacggtttctgtgtcgtagctaacgcattaagcgccccgcctggggagtacggccgcaaggctaaaactcaaaggaattgacgggggcccgcacaagcggcggagcatgcggattaattcgatgcaacgcgaagaaccttaccaaggcttgacatacaccggaaacggccagagatggtcgcccccttgtggtcggtgtacaggtggtgcatggttgtcgtcagctcgtgtcgtgagatgttgggttaagtcccgcaacgagcgcaaccctcgttctatgttgccagcgcgttatggcggggactcataggagactgccggggtcaactcggaggaaggtggggatgacgtcaaatcatcatgccccttatgtcttgggcttcacgcatgctacaatggccggtacaaagggctgcgataccgtaaggtggagcgaatcccaaaaagccggtctcagttcggattgaggtctgcaactcgacctcatgaagtcggagtcgctagtaatcgcagatcagcaacgctgcggtgaatacgttcccgggccttgtacacaccgcccgtcaagtcatgaaagtcggtaacacccgaagccggtggcctaacccttgtggaaggagccgtcgaaggtgggatcggtgattaggactaagtcgtaacaaggtagccgtaccggaaggtgcggctggatcacctccttt

SEQ ID NO: 20 - DNA, 1543 bp, Stenotrophomonas rhizophila
  source 1..1543: mol_type = genomic DNA; note = DP20; SBI4263
tgaagagtttgatcctggctcagagtgaacgctggcggtaggcctaacacatgcaagtcgaacggcagcacagtaagagcttgctcttatgggtggcgagtggcggacgggtgaggaatacatcggaatctaccttttcgtgggggataacgtagggaaacttacgctaataccgcatacgaccttcgggtgaaagcaggggaccttcgggccttgcgcggatagatgagccgatgtcggattagctagttggcggggtaaaggcccaccaaggcgacgatccgtagctggtctgagaggatgatcagccacactggaactgagacacggtccagactcctacgggaggcagcagtggggaatattggacaatgggcgcaagcctgatccagccataccgcgtgggtgaagaaggccttcgggttgtaaagcccttttgttgggaaagaaaagcagtcggctaatacccggttgttctgacggtacccaaagaataagcaccggctaacttcgtgccagcagccgcggtaatacgaagggtgcaagcgttactcggaattactgggcgtaaagcgtgcgtaggtggttgtttaagtctgttgtgaaagccctgggctcaacctgggaattgcagtggatactgggcgactagagtgtggtagagggtagtggaattcccggtgtagcagtgaaatgcgtagagatcgggaggaacatccatggcgaaggcagctacctggaccaacactgacactgaggcacgaaagcgtggggagcaaacaggattagataccctggtagtccacgccctaaacgatgcgaactggatgttgggtgcaatttggcacgcagtatcgaagctaacgcgttaagttcgccgcctggggagtacggtcgcaagactgaaactcaaaggaattgacgggggcccgcacaagcggtggagtatgtggtttaattcgatgcaacgcgaagaaccttacctggtcttgacatgtcgagaactttccagagatggattggtgccttcgggaactcgaacacaggtgctgcatggctgtcgtcagctcgtgtcgtgagatgttgggttaagtcccgcaacgagcgcaacccttgtccttagttgccagcacgtaatggtgggaactctaaggagaccgccggtgacaaaccggaggaaggtggggatgacgtcaagtcatcatggcccttacgaccagggctacacacgtactacaatggtagggacagagggctgcaaacccgcgagggcaagccaatcccagaaaccctatctcagtccggattggagtctgcaactcgactccatgaagtcggaatcgctagtaatcgcagatcagcattgctgcggtgaatacgttcccgggccttgtacacaccgcccgtcacaccatgggagtttgttgcaccagaagcaggtagcttaaccttcgggagggcgcttgccacggtgtggccgatgactggggtgaagtcgtaacaaggtagccgtatcggaaggtgcggctggatcacctccttt

SEQ ID NO: 21 - DNA, 927 bp, Candida santamariae
  source 1..927: mol_type = genomic DNA; note = DP21; SBI3353
gggggcatcagtattcagttgtcagaggtgaaattcttggatttactgaagactaactactgcgaaagcatttgccaaggacgttttcattaatcaagaacgaaagttaggggatcgaagatgatcagataccgtcgtagtcttaaccataaactatgccgactagggatcgggtgttgttctttttttgacgcactcggcaccttacgagaaatcaaagtctttgggttctggggggagtatggtcgcaaggctgaaacttaaaggaattgacggaagggcaccaccaggagtggagcctgcggcttaatttgactcaacacggggaaactcaccaggtccagacacaataaggattgacagattgagagctctttcttgattttgtgggtggtggtgcatggccgttcttagttggtggagtgatttgtctgcttaattgcgataacgaacgagaccttaacctactaaatagtgctgctagcttttgctggtatagtcacttcttagagggactatcgatttcaagtcgatggaagtttgaggcaataacaggtctgtgatgcccttagacgttctgggccgcacgcgcgctacactgacggagccagcgagttctaaccttggccgagaggtctgggtaatcttgtgaaactccgtcgtgctggggatagagcattgtaattattgctcttcaacgaggaattcctagtaagcgcaagtcatcagcttgcgttgattacgtccctgccctttgtacacaccgcccgtcgctactaccgattgaatggcttagtgaggcttccggattggtttaaagaagggggcaactccatcttggaaccgaaaagctagtcaaacttggtcatttagaggaagtaaaagtcgtaacaaggtttccgtaggtgaacctgcggaaggatcatt

SEQ ID NO: 22 - DNA, 1539 bp, Rahnella sp.
  source 1..1539: mol_type = genomic DNA; note = DP22; SBI3316
ttgaagagtttgatcatggctcagattgaacgctggcggcaggcctaacacatgcaagtcgagcggcagcgggaagtagcttgctactttgccggcgagcggcggacgggtgagtaatgtctgggaaactgcctgatggagggggataactactggaaacggtagctaataccgcatgacctcgcaagagcaaagtgggggaccttcgggcctcacgccatcggatgtgcccagatgggattagctagtaggtgaggtaatggctcacctaggcgacgatccctagctggtctgagaggatgaccagccacactggaactgagacacggtccagactcctacgggaggcagcagtggggaatattgcacaatgggcgcaagcctgatgcagccatgccgcgtgtgtgaagaaggccttagggttgtaaagcactttcagcgaggaggaagggttcagtgttaatagcactgaacattgacgttactcgcagaagaagcaccggctaactccgtgccagcagccgcggtaatacggagggtgcaagcgttaatcggaattactgggcgtaaagcgcacgcaggcggtttgttaagtcagatgtgaaatccccgagcttaacttgggaactgcatttgaaactggcaagctagagtcttgtagaggggggtagaattccaggtgtagcggtgaaatgcgtagagatctggaggaataccggtggcgaaggcggccccctggacaaagactgacgctcaggtgcgaaagcgtggggagcaaacaggattagataccctggtagtccacgctgtaaacgatgtcgacttggaggttgtgcccttgaggcgtggcttccggagctaacgcgttaagtcgaccgcctggggagtacggccgcaaggttaaaactcaaatgaattgacgggggcccgcacaagcggtggagcatgtggtttaattcgatgcaacgcgaagaaccttacctactcttgacatccagagaattcgctagagatagcttagtgccttcgggaactctgagacaggtgctgcatggctgtcgtcagctcgtgttgtgaaatgttgggttaagtcccgcaacgagcgcaacccttatcctttgttgccagcgagtaatgtcgggaactcaaaggagactgccggtgataaaccggaggaaggtggggatgacgtcaagtcatcatggcccttacgagtagggctacacacgtgctacaatggcatatacaaagagaagcaaactcgcgagagcaagcggacctcataaagtatgtcgtagtccggattggagtctgcaactcgactccatgaagtcggaatcgctagtaatcgtagatcagaatgctacggtgaatacgttcccgggccttgtacacaccgcccgtcacaccatgggagtgggttgcaaaagaagtaggtagcttaaccttcgggagggcgcttaccactttgtgattcatgactggggtgaagtcgtaacaaggtaaccgtaggggaacctgcggttggatcacctcctt

SEQ ID NO: 23 - DNA, 1536 bp, Erwinia billingiae
  source 1..1536: mol_type = genomic DNA; note = DP23; SBI3317
ttgaagagtttgatcatggctcagattgaacgctggcggcaggcctaacacatgcaagtcgaacggtagcacagagagcttgctcttgggtgacgagtggcggacgggtgagtaatgtctgggaaactgcccgatggagggggataactactggaaacggtagctaataccgcataacgtcttcggaccaaagtgggggaccttcgggcctcacaccatcggatgtgcccagatgggattagctagtaggtggggtaatggctcacctaggcgacgatccctagctggtctgagaggatgaccagccacactggaactgagacacggtccagactcctacgggaggcagcagtggggaatattgcacaatgggcgcaagcctgatgcagccatgccgcgtgtatgaagaaggccttcgggttgtaaagtactttcagcggggaggaaggcgatacggttaataaccgtgtcgattgacgttacccgcagaagaagcaccggctaactccgtgccagcagccgcggtaatacggagggtgcaagcgttaatcggaattactgggcgtaaagcgcacgcaggcggtctgtcaagtcagatgtgaaatccccgggcttaacctgggaactgcatttgaaactggcaggcttgagtctcgtagaggggggtagaattccaggtgtagcggtgaaatgcgtagagatctggaggaataccggtggcgaaggcggccccctggacgaagactgacgctcaggtgcgaaagcgtggggagcaaacaggattagataccctggtagtccacgctgtaaacgatgtcgacttggaggttgtgcccttgaggcgtggcttccggagctaacgcgttaagtcgaccgcctggggagtacggccgcaaggttaaaactcaaatgaattgacgggggcccgcacaagcggtggagcatgtggtttaattcgatgcaacgcgaagaaccttacctggccttgacatccacagaattcggcagagatgccttagtgccttcgggaactgtgagacaggtgctgcatggctgtcgtcagctcgtgttgtgaaatgttgggttaagtcccgcaacgagcgcaacccttatcctttgttgccagcgattcggtcgggaactcaaaggagactgccggtgataaaccggaggaaggtggggatgacgtcaagtcatcatggcccttacggccagggctacacacgtgctacaatggcgcatacaaagagaagcgacctcgcgagagcaagcggacctcataaagtgcgtcgtagtccggatcggagtctgcaactcgactccgtgaagtcggaatcgctagtaatcgtagatcagaatgctacggtgaatacgttcccgggccttgtacacaccgcccgtcacaccatgggagtgggttgcaaaagaagtaggtagcttaaccttcgggagggcgcttaccactttgtgattcatgactggggtgaagtcgtaacaaggtaaccgtaggggaacctgcggttggatcacctcctt

SEQ ID NO: 24 - DNA, 1316 bp, Filobasidium globisporum
  source 1..1316: mol_type = genomic DNA; note = DP24; SBI3327
agcatttgattatggtgcttactgattgctatctaggggtttaacacatgctagtcaatgatcttttagattatggcgtacgggctaggaatacttagaatgataactctatgatcgcagtaatagcgtaaaaggtataataccgcatagaggttcgcttcgtatctcaataggtagttggtgaggtaaagctcaacaagccgatgatgagtaatattggatgaaagtcttaaatatagcagtggaaatgaaaaagtccaccgttatttattaacgcagcagtggagaatcgtcgtaatgtgcagtattcatttatggataagcatgaacgcgctacctagattcggataggagatagcatcttctaccgataaaagaacttagaataatgatctagttctcattagtgggtgacaatcgccgtgccagcatcagcggtaaaacggcttccgcaagcaatagtaatttaaattggtgtaaagggtacgtagccggccttattaggctagagttagatacgggtaagtacaatacttggagtagggctgatatcttatgatcccaaggggagtgctaaaggcgaaggcaacttactggtaataactgacggtgaggtacgaaggtcagggcatggaaagagattagatacctcattactcctgacagtaaacgatgtagattaaagattggaataattctgtcttaacgctaacgcattaaatctaccacctgtagagtatagtcgcaaggccgaaatacaaataattagacggctctagagcaaacggagtgaagcatgttatttaatacgataacccgcgtaaaatcttaccagttcttgaatcttagacaggtgttgcatggttgtcgtcagctcgtgctaatggtgtctggttaattccaaataacgagcgcaatccttacttctagttttctaggagtctccatttgacatacgtgtcaatggtttaaggaatatgacaaaccctcatggcccttatggactgggcaatagacgtgccacaagaatctagacaaaatgacgcgaaatggtaacaatgagctaatcatcaaagaagattaatgtacgaattatgggctggaactcgcccatatgaagtaggaattccgagtaatcgcgtatcagaacgacgcggtgaacatcatctctggagtgtactaactgctcgtcacgggacgaaagggagtgtattatgaagtggggctaattggttaactccggtgagtgtcacgaataatccttcccgattgttctgaagtcgaaacaaggtaaccgtaagggaacttgcggttga

SEQ ID NO: 25 - DNA, 1520 bp, Penicillium solitum
  source 1..1520: mol_type = genomic DNA; note = DP25; SBI3329
tacggagagtttgatcctggctcaggatgaacgctggcggcgtgcttaacacatgcaagtcgaacggtgaagccaagcttgcttggtggatcagtggcgaacgggtgagtaacacgtgagcaacctgccctggactctgggataagcgctggaaacggcgtctaatactggatatgagctccttccgcatggtgggggttggaaagatttttcggtctgggatgggctcgcggcctatcagcttgttggtgaggtaatggctcaccaaggcgtcgacgggtagccggcctgagagggtgaccggccacactgggactgagacacggcccagactcctacgggaggcagcagtggggaatattgcacaatgggcggaagcctgatgcagcaacgccgcgtgagggatgacggccttcgggttgtaaacctcttttagcagggaagaagcgaaagtgacggtacctgcagaaaaagcgccggctaactacgtgccagcagccgcggtaatacgtagggcgcaagcgttatccggaattattgggcgtaaagagctcgtaggcggtttgtcgcgtctgctgtgaaatcccgaggctcaacctcgggcctgcagtgggtacgggcagactagagtgcggtaggggagattggaattcctggtgtagcggtggaatgcgcagatatcaggaggaacaccgatggcgaaggcagatctctgggccgtaactgacgctgaggagcgaaagggtggggagcaaacaggcttagataccctggtagtccaccccgtaaacgttgggaactagttgtggggaccattccacggtttccgtgacgcagctaacgcattaagttccccgcctggggagtacggccgcaaggctaaaactcaaaggaattgacggggacccgcacaagcggcggagcatgcggattaattcgatgcaacgcgaagaaccttaccaaggcttgacatatacgagaacgggccagaaatggtcaactctttggacactcgtaaacaggtggtgcatggttgtcgtcagctcgtgtcgtgagatgttgggttaagtcccgcaacgagcgcaaccctcgttctatgttgccagcacgtaatggtgggaactcatgggatactgccggggtcaactcggaggaaggtggggatgacgtcaaatcatcatgccccttatgtcttgggcttcacgcatgctacaatggccggtacaaagggctgcaataccgtaaggtggagcgaatcccaaaaagccggtcccagttcggattgaggtctgcaactcgacctcatgaagtcggagtcgctagtaatcgcagatcagcaacgctgcggtgaatacgttcccgggtcttgtacacaccgcccgtcaagtcatgaaagtcggtaacacctgaagccggtggcccaacccttgtggagggagccgtcgaaggtgggatcggtaattaggactaagtcgtaacaaggtagccgtaccggaaggtgcggctggatcacctccttt

SEQ ID NO: 26 - DNA, 1482 bp, Methylobacterium sp.
  source 1..1482: mol_type = genomic DNA; note = DP26; SBI3330
cttgagagtttgatcctggctcagagcgaacgctggcggcaggcttaacacatgcaagtcgagcgggcatcttcggatgtcagcggcagacgggtgagtaacacgtgggaacgtacccttcggttcggaataacgctgggaaactagcgctaataccggatacgcccttttggggaaaggtttactgccgaaggatcggcccgcgtctgattagctagttggtggggtaacggcctaccaaggcgacgatcagtagctggtctgagaggatgatcagccacactgggactgagacacggcccagactcctacgggaggcagcagtggggaatattggacaatgggcgcaagcctgatccagccatgccgcgtgagtgatgaaggccttagggttgtaaagctcttttgtccgggacgataatgacggtaccggaagaataagccccggctaacttcgtgccagcagccgcggtaatacgaagggggctagcgttgctcggaatcactgggcgtaaagggcgcgtaggcggccattcaagtcgggggtgaaagcctgtggctcaaccacagaattgccttcgatactgtttggcttgagtatggtagaggttggtggaactgcgagtgtagaggtgaaattcgtagatattcgcaagaacaccggtggcgaaggcggccaactggaccattactgacgctgaggcgcgaaagcgtggggagcaaacaggattagataccctggtagtccacgccgtaaacgatgaatgccagctgttggggtgcttgcacctcagtagcgcagctaacgctttaagcattccgcctggggagtacggtcgcaagattaaaactcaaaggaattgacgggggcccgcacaagcggtggagcatgtggtttaattcgaagcaacgcgcagaaccttaccatcccttgacatggcatgttacccggagagattcggggtccacttcggtggcgtgcacacaggtgctgcatggctgtcgtcagctcgtgtcgtgagatgttgggttaagtcccgcaacgagcgcaacccacgtccttagttgccatcattcagttgggcactctagggagactgccggtgataagccgcgaggaaggtgtggatgacgtcaagtcctcatggcccttacgggatgggctacacacgtgctacaatggcggtgacagtgggacgcgaaggagcgatctggagcaaatccccaaaaaccgtctcagttcagattgcactctgcaactcgagtgcatgaaggcggaatcgctagtaatcgtggatcagcatgccacggtgaatacgttcccgggccttgtacacaccgcccgtcacaccatgggagttggtcttacccgacggcgctgcgccaaccgcaaggaggcaggcgaccacggtagggtcagcgactggggtgaagtcgtaacaaggtagccgtaggggaacctgcggctggatcacctccttt

SEQ ID NO: 27 - DNA, 935 bp, Sphingomonas sp.
  source 1..935: mol_type = genomic DNA; note = DP27; SBI3332
cttgagagtttgatcctggctcagaacgaacgctggcggcatgcctaacacatgcaagtcgaacgatgctttcgggcatagtggcgcacgggtgcgtaacgcgtgggaatctgccctcaggttcggaataacagctggaaacggctgctaataccggatgatatcgcaagatcaaagatttatcgcctgaggatgagcccgcgttggattaggtagttggtggggtaaaggcctaccaagccgacgatccatagctggtctgagaggatgatcagccacactgggactgagacacggcccagactcctacgggaggcagcagtggggaatattggacaatgggcgcaagcctgatccagcaatgccgcgtgagtgatgaaggccctagggttgtaaagctcttttacccgggaagataatgactgtaccgggagaataagccccggctaactccgtgccagcagccgcggtaatacggagggggctagcgttgttcggaattactgggcgtaaagcgcacgtaggcggctttgtaagtcagaggtgaaagcctggagctcaactccagaactgcctttgagactgcatcgcttgaatccaggagaggtcagtggaattccgagtgtagaggtgaaattcgtagatattcggaagaacaccagtggcgaaggcggctgactggactggtattgacgctgaggtgcgaaagcgtggggagcaaacaggattagataccctggtagtccacgccgtaaacgatgataactagctgtccgggcacttggtgcttgggtggcgcagctaacgcattaagttatccgcctggggagtacggccgcaaggttaaaactcaaaggaattgacgggggcctgcacaagcggtggagcatgtggtttaattcgaagcaacgcgcagaaccttaccagcgtttgac

SEQ ID NO: 28 - DNA, 931 bp, Aureobasidium pullulans
  source 1..931: mol_type = genomic DNA; note = DP28; SBI3355
atagtcgggggcatcagtattcaattgtcagaggtgaaattcttggatttattgaagactaactactgcgaaagcatttgccaaggatgttttcattaatcagtgaacgaaagttaggggatcgaagacgatcagataccgtcgtagtcttaaccataaactatgccgactagggatcgggcgatgttatcattttgactcgctcggcaccttacgagaaatcaaagtctttgggttctggggggagtatggtcgcaaggctgaaacttaaagaaattgacggaagggcaccaccaggcgtggagcctgcggcttaatttgactcaacacggggaaactcaccaggtccagacacaataaggattgacagattgagagctctttcttgattttgtgggtggtggtgcatggccgttcttagttggtggagtgatttgtctgcttaattgcgataacgaacgagaccttaacctgctaaatagcccggcccgctttggcgggtcgccggcttcttagagggactatcggctcaagccgatggaagtttgaggcaataacaggtctgtgatgcccttagatgttctgggccgcacgcgcgctacactgacagagccaacgagttcatttccttgcccggaagggttgggtaatcttgttaaactctgtcgtgctggggatagagcattgcaattattgctcttcaacgaggaatgcctagtaagcgtacgtcatcagcgtgcgttgattacgtccctgccctttgtacacaccgcccgtcgctactaccgattgaatggctgagtgaggccttcggactggcccagggaggtcggcaacgaccacccagggccggaaagttggtcaaactccgtcatttagaggaagtaaaagtcgtaacaaggtttccgtaggtgaacctgcggaaggatca

SEQ ID NO: 29 - DNA, 1002 bp, Pseudoclavibacter helvolus
  source 1..1002: mol_type = genomic DNA; note = DP29; SBI3359
tacggagagtttgatcctggctcaggacgaacgctggcggcgtgcttaacacatgcaagtcgaacgatgaagcccagcttgctgggttgattagtggcgaacgggtgagtaacacgtgagcaacgtgcccataactctgggataacctccggaaacggtggctaatactggatatctaacacgatcgcatggtctgtgtttggaaagattttttggttatggatcggctcacggcctatcagcttgttggtgaggtaatggctcaccaaggcgacgacgggtagccggcctgagagggtgaccggccacactgggactgagacacggcccagactcctacgggaggcagcagtggggaatattgcacaatgggcgaaagcctgatgcagcaacgccgcgtgagggatgacggcattcgggttgtaaacctcttttagtagggaagaagcgaaagtgacggtacctgcagaaaaagcaccggctaactacgtgccagcagccgctgtaatacgtagggtgcaagcgttgtccggaattattgggcgtaaagagctcgtaggcggtttgtcgcgtctgctgtgaaatcccgaggctcaacctcgggtctgcagtgggtacgggcagactagagtgtggtaggggagattggaattcctggtgtagcggtggaatgcgcagatatcaggaggaacaccgatggcgaaggcagatctctgggccattactgacgctgaggagcgaaagcatggggagcgaacaggattagataccctggtagtccatgccgtaaacgttgggcgctagatgtggggaccattccacggtttccgtgtcgtagctaacgcattaagcgccccgcctggggagtacggccgcaaggctaaaactcaaaggaattgacgggggcccgcacaagcggcggagcatgcggattaattcgatgcaacgcgaagaaccttaccaaggcttgacatataccggaaacgttcagaaatgttcgcc

SEQ ID NO: 30 - DNA, 1520 bp, Microbacterium testaceum
  source 1..1520: mol_type = genomic DNA; note = DP30; SBI3405
tacggagagtttgatcctggctcaggatgaacgctggcggcgtgcttaacacatgcaagtcgaacggtgaagccaagcttgcttggtggatcagtggcgaacgggtgagtaacacgtgagcaacctgccctggactctgggataagcgctggaaacggcgtctaatactggatatgagacgtgatcgcatggtcgtgtttggaaagatttttcggtctgggatgggctcgcggcctatcagcttgttggtgaggtaatggctcaccaaggcgtcgacgggtagccggcctgagagggtgaccggccacactgggactgagacacggcccagactcctacgggaggcagcagtggggaatattgcacaatgggcgaaagcctgatgcagcaacgccgcgtgagggatgacggccttcgggttgtaaacctcttttagcagggaagaagcgaaagtgacggtacctgcagaaaaagcgccggctaactacgtgccagcagccgcggtaatacgtagggcgcaagcgttatccggaattattgggcgtaaagagctcgtaggcggtttgtcgcgtctgctgtgaaatcccgaggctcaacctcgggcctgcagtgggtacgggcagactagagtgcggtaggggagattggaattcctggtgtagcggtggaatgcgcagatatcaggaggaacaccgatggcgaaggcagatctctgggccgtaactgacgctgaggagcgaaagggtggggagcaaacaggcttagataccctggtagtccaccccgtaaacgttgggaactagttgtggggaccattccacggtttccgtgacgcagctaacgcattaagttccccgcctggggagtacggccgcaaggctaaaactcaaaggaattgacggggacccgcacaagcggcggagcatgcggattaattcgatgcaacgcgaagaaccttaccaaggcttgacatatacgagaacgggccagaaatggtcaactctttggacactcgtaaacaggtggtgcatggttgtcgtcagctcgtgtcgtgagatgttgggttaagtcccgcaacgagcgcaaccctcgttctatgttgccagcacgtaatggtgggaactcatgggatactgccggggtcaactcggaggaaggtggggatgacgtcaaatcatcatgccccttatgtcttgggcttcacgcatgctacaatggccggtacaaagggctgcaataccgtgaggtggagcgaatcccaaaaagccggtcccagttcggattgaggtctgcaactcgacctcatgaagtcggagtcgctagtaatcgcagatcagcaacgctgcggtgaatacgttcccgggtcttgtacacaccgcccgtcaagtcatgaaagtcggtaacacctgaagccggtggcccaacccttgtggagggagccgtcgaaggtgggatcggtaattaggactaagtcgtaacaaggtagccgtaccggaaggtgcggctggatcacctccttt

SEQ ID NO: 31 - DNA, 941 bp, Sporisorium reilianum
  source 1..941: mol_type = genomic DNA; note = DP31; SBI3406
cagccgggggcattagtatttgcacgctagaggtgaaattcttggattgtgcaaagacttcctactgcgaaagcatttgccaagaatgttttcattaatcaagaacgaaggttagggtatcgaaaacgattagataccgttgtagtcttaacagtaaactatgccgactccgaatcggtcgatgctcatttcactggctcgatcggcgcggtacgagaaatcaaagtttttgggttctggggggagtatggtcgcaaggctgaaacttaaagaaattgacggaagggcaccaccaggagtggagcctgcggcttaatttgactcaacacgggaaaactcaccgggtccggacatagtaaggattgacagattgatggcgctttcatgattctatgggtggtggtgcatggccgttcttagttggtggagtgatttgtctggttaattccgataacgaacgagaccttgacctgctaaatagacgggttgacattttgttggccccttatgtcttcttagagggacaatcgaccgtctaggtgatggaggcaaaaggcaataacaggtctgtgatgcccttagatgttccgggctgcacgcgcgctacactgacagagacaacgagtggggccccttgtccgaaatgactgggtaaacttgtgaaactttgtcgtgctggggatggagctttgtaatttttgctcttcaacgaggaattcctagtaagcgcaagtcatcagcttgcgttgactacgtccctgccctttgtacacaccgcccgtcgctactaccgattgaatggcttagtgaggacttgggagagtacatcggggagccagcaatggcaccctgacggctcaaactcttacaaacttggtcatttagaggaagtaaaagtcgtaacaaggtatctgtaggtgaacctgcagatggatcatttc

SEQ ID NO: 32 - DNA, 1072 bp, Hafnia paralvei
  source 1..1072: mol_type = genomic DNA; note = DP32; SBI3438
actgagcattgacgttactcgcagaagaagcaccggctaactccgtgccagcagccgcggtaatacggagggtgcaagcgttaatcggaattactgggcgtaaagcgcacgcaggcggtttgttaagtcagatgtgaaatccccgagcttaacttgggaactgcatttgaaactggcaagctagagtcttgtagaggggggtagaattccaggtgtagcggtgaaatgcgtagagatctggaggaataccggtggcgaaggcggccccctggacaaagactgacgctcaggtgcgaaagcgtggggagcaaacaggattagataccctggtagtccacgctgtaaacgatgtcgacttggaggttgtgcccttgaggcgtggcttccggagctaacgcgttaagtcgaccgcctggggagtacggccgcaaggttaaaactcaaatgaattgacgggggcccgcacaagcggtggagcatgtggtttaattcgatgcaacgcgaagaaccttacctactcttgacatccagagaattcgctagagatagcttagtgccttcgggaactctgagacaggtgctgcatggctgtcgtcagctcgtgttgtgaaatgttgggttaagtcccgcaacgagcgcaacccttatcctttgttgccagcgagtaatgtcgggaactcaaaggagactgccggtgataaaccggaggaaggtggggatgacgtcaagtcatcatggcccttacgagtagggctacacacgtgctacaatggcatatacaaagagaagcgaactcgcgagagcaagcggacctcataaagtatgtcgtagtccggattggagtctgcaactcgactccatgaagtcggaatcgctagtaatcgtagatcagaatgctacggtgaatacgttcccgggccttgtacacaccgcccgtcacaccatgggagtgggttgcaaaagaagtaggtagcttaaccttcgggagggcgcttaccactttgtgattcatgactggggtgaagtcgtaacaaggtaaccgtaggggaacctgcggttggatcacctcctt

SEQ ID NO: 33 - DNA, 853 bp, Erwinia persicinus
  source 1..853: mol_type = genomic DNA; note = DP33; SBI3440
ggaggaaggcgtagagatctggaggaataccggtggcgaaggcggccccctggacaaagactgacgctcaggtgcgaaagcgtggggagcaaacaggattagataccctggtagtccacgccgtaaacgatgtcgacttggaggttgtgcccttgaggcgtggcttccggagctaacgcgttaagtcgaccgcctggggagtacggccgcaaggttaaaactcaaatgaattgacgggggcccgcacaagcggtggagcatgtggtttaattcgatgcaacgcgaagaaccttacctggccttgacatccacggaattcggcagagatgccttagtgccttcgggaaccgtgagacaggtgctgcatggctgtcgtcagctcgtgttgtgaaatgttgggttaagtcccgcaacgagcgcaacccttatcctttgttgccagcacgtaatggtgggaactcaaaggagactgccggtgataaaccggaggaaggtggggatgacgtcaagtcatcatggcccttacggccagggctacacacgtgctacaatggcgcatacaaagagaagcgacctcgcgagagcaagcggacctcataaagtgcgtcgtagtccggatcggagtctgcaactcgactccgtgaagtcggaatcgctagtaatcgtagatcagaatgctacggtgaatacgttcccgggccttgtacacaccgcccgtcacaccatgggagtgggttgcaaaagaagtaggtagcttaaccttcgggagggcgcttaccactttgtgattcatgactggggtgaagtcgtaacaaggtaaccgtaggggaacctgcggttggatcacctcctt

SEQ ID NO: 34 - DNA, 1519 bp, Plantibacter flavus
  source 1..1519: mol_type = genomic DNA; note = DP34; SBI3473
tacggagagtttgatcctggctcaggacgaacgctggcggcgtgcttaacacatgcaagtcgaacgatgaagcccagcttgctgggtggattagtggcgaacgggtgagtaacacgtgagtaacctgcccttgactctgggataagcgttggaaacgacgtctaataccggatacgagcttccaccgcatggtgagttgctggaaagaattttggtcaaggatggactcgcggcctatcagcttgttggtgaggtaatggctcaccaaggcgacgacgggtagccggcctgagagggtgaccggccacactgggactgagacacggcccagactcctacgggaggcagcagtggggaatattgcacaatgggcgaaagcctgatgcagcaacgccgcgtgagggacgacggccttcgggttgtaaacctcttttagcagggaagaagcgaaagtgacggtacctgcagaaaaagcaccggctaactacgtgccagcagccgcggtaatacgtagggtgcaagcgttgtccggaattattgggcgtaaagagctcgtaggcggtttgtcgcgtctgctgtgaaatcccgaggctcaacctcgggtctgcagtgggtacgggcagactagagtgcggtaggggagattggaattcctggtgtagcggtggaatgcgcagatatcaggaggaacaccgatggcgaaggcagatctctgggccgctactgacgctgaggagcgaaagggtggggagcaaacaggcttagataccctggtagtccaccccgtaaacgttgggcgctagatgtggggaccattccacggtttccgtgtcgtagctaacgcattaagcgccccgcctggggagtacggccgcaaggctaaaactcaaaggaattgacgggggcccgcacaagcggcggagcatgcggattaattcgatgcaacgcgaagaaccttaccaaggcttgacatatacgagaacgggccagaaatggtcaactctttggacactcgtaaacaggtggtgcatggttgtcgtcagctcgtgtcgtgagatgttgggttaagtcccgcaacgagcgcaaccctcgttctatgttgccagcacgtaatggtgggaactcatgggatactgccggggtcaactcggaggaaggtggggacgacgtcaaatcatcatgccccttatgtcttgggcttcacgcatgctacaatggccagtacaaagggctgcaataccgtaaggtggagcgaatcccaaaaagctggtcccagttcggattgaggtctgcaactcgacctcatgaagtcggagtcgctagtaatcgcagatcagcaacgctgcggtgaatacgttcccgggccttgtacacaccgcccgtcaagtcatgaaagtcggtaacacccgaagccagtggcctaaccgcaaggatggagctgtctaaggtgggatcggtaattaggactaagtcgtaacaaggtagccgtaccggaaggtgcggctggatcacctccttt

SEQ ID NO: 35 - DNA, 1536 bp, Pantoea ananatis
  source 1..1536: mol_type = genomic DNA; note = DP35; SBI3477
ttgaagagtttgatcatggctcagattgaacgctggcggcaggcctaacacatgcaagtcggacggtagcacagagagcttgctcttgggtgacgagtggcggacgggtgagtaatgtctggggatctgcccgatagagggggataaccactggaaacggtggctaataccgcataacgtcgcaagaccaaagagggggaccttcgggcctctcactatcggatgaacccagatgggattagctagtaggcggggtaatggcccacctaggcgacgatccctagctggtctgagaggatgaccagccacactggaactgagacacggtccagactcctacgggaggcagcagtggggaatattgcacaatgggcgcaagcctgatgcagccatgccgcgtgtatgaagaaggccttcgggttgtaaagtactttcagcggggaggaaggcgatgaggttaataaccgcgtcgattgacgttacccgcagaagaagcaccggctaactccgtgccagcagccgcggtaatacggagggtgcaagcgttaatcggaattactgggcgtaaagcgcacgcaggcggtctgttaagtcagatgtgaaatccccgggcttaacctgggaactgcatttgaaactggcaggcttgagtcttgtagaggggggtagaattccaggtgtagcggtgaaatgcgtagagatctggaggaataccggtggcgaaggcggccccctggacaaagactgacgctcaggtgcgaaagcgtggggagcaaacaggattagataccctggtagtccacgccgtaaacgatgtcgacttggaggttgttcccttgaggagtggcttccggagctaacgcgttaagtcgaccgcctggggagtacggccgcaaggttaaaactcaaatgaattgacgggggcccgcacaagcggtggagcatgtggtttaattcgatgcaacgcgaagaaccttacctactcttgacatccagcgaacttagcagagatgctttggtgccttcgggaacgctgagacaggtgctgcatggctgtcgtcagctcgtgttgtgaaatgttgggttaagtcccgcaacgagcgcaacccttatcctttgttgccagcgattcggtcgggaactcaaaggagactgccggtgataaaccggaggaaggtggggatgacgtcaagtcatcatggcccttacgagtagggctacacacgtgctacaatggcgcatacaaagagaagcgacctcgcgagagcaagcggacctcacaaagtgcgtcgtagtccggatcggagtctgcaactcgactccgtgaagtcggaatcgctagtaatcgtggatcagaatgccacggtgaatacgttcccgggccttgtacacaccgcccgtcacaccatgggagtgggttgcaaaagaagtaggtagcttaaccttcgggagggcgcttaccactttgtgattcattactggggtgaagtcgtaacaaggtaaccgtaggggaacctgcggttggatcacctcctt

SEQ ID NO: 36 - DNA, 993 bp, Pantoea vagans
  source 1..993: mol_type = genomic DNA; note = DP36; SBI3478
ttgaagagtttgatcatggctcagattgaacgctggcggcaggcctaacacatgcaagtcggacggtagcacagagagcttgctcttgggtgacgagtggcggacgggtgagtaatgtctggggatctgcccgatagagggggataaccactggaaacggtggctaataccgcataacgtcgcaagaccaaagagggggaccttcgggcctctcactatcggatgaacccagatgggattagctagtaggcggggtaatggcccacctaggcgacgatccctagctggtctgagaggatgaccagccacactggaactgagacacggtccagactcctacgggaggcagcagtggggaatattgcacaatgggcgcaagcctgatgcagccatgccgcgtgtatgaagaaggccttcgggttgtaaagtactttcagcggggaggaaggcgatgcggttaataaccgcgtcgattgacgttacccgcagaagaagcaccggctaactccgtgccagcagccgcggtaatacggagggtgcaagcgttaatcggaattactgggcgtaaagcgcacgcaggcggtctgttaagtcagatgtgaaatccccgggcttaacctgggaactgcatttgaaactggcaggcttgagtcttgtagaggggggtagaattccaggtgtagcggtgaaatgcgtagagatctggaggaataccggtggcgaaggcggccccctggacaaagactgacgctcaggtgcgaaagcgtggggagcaaacaggattagataccctggtagtccacgccgtaaacgatgtcgacttggaggttgttcccttgaggagtggcttccggagctaacgcgttaagtcgaccgcctggggagtacggccgcaaggttaaaactcaaatgaattgacgggggcccgcacaagcggtggagcatgtggtttaattcgatgcaacgcgaagaaccttacctactcttgacatc

SEQ ID NO: 37 - DNA, 1532 bp, Pseudomonas rhodesiae
  source 1..1532: mol_type = genomic DNA; note = DP37; SBI3497
tgaagagtttgatcatggctcagattgaacgctggcggcaggcctaacacatgcaagtcgagcggtagagagaagcttgcttctcttgagagcggcggacgggtgagtaatgcctaggaatctgcctggtagtgggggataacgttcggaaacgaacgctaataccgcatacgtcctacgggagaaagcaggggaccttcgggccttgcgctatcagatgagcctaggtcggattagctagttggtggggtaatggctcaccaaggcgacgatccgtaactggtctgagaggatgatcagtcacactggaactgagacacggtccagactcctacgggaggcagcagtggggaatattggacaatgggcgaaagcctgatccagccatgccgcgtgtgtgaagaaggtcttcggattgtaaagcactttaagttgggaggaagggccattacctaatacgtgatggttttgacgttaccgacagaataagcaccggctaactctgtgccagcagccgcggtaatacagagggtgcaagcgttaatcggaattactgggcgtaaagcgcgcgtaggtggtttgttaagttggatgtgaaatccccgggctcaacctgggaactgcattcaaaactgactgactagagtatggtagagggtggtggaatttcctgtgtagcggtgaaatgcgtagatataggaaggaacaccagtggcgaaggcgaccacctggactgatactgacactgaggtgcgaaagcgtggggagcaaacaggattagataccctggtagtccacgccgtaaacgatgtcaactagccgttgggagccttgagctcttagtggcgcagctaacgcattaagttgaccgcctggggagtacggccgcaaggttaaaactcaaatgaattgacgggggcccgcacaagcggtggagcatgtggtttaattcgaagcaacgcgaagaaccttaccaggccttgacatccaatgaactttctagagatagattggtgccttcgggaacattgagacaggtgctgcatggctgtcgtcagctcgtgtcgtgagatgttgggttaagtcccgtaacgagcgcaacccttgtccttagttaccagcacgtaatggtgggcactctaaggagactgccggtgacaaaccggaggaaggtggggatgacgtcaagtcatcatggcccttacggcctgggctacacacgtgctacaatggtcggtacagagggttgccaagccgcgaggtggagctaatcccataaaaccgatcgtagtccggatcgcagtctgcaactcgactgcgtgaagtcggaatcgctagtaatcgcgaatcagaatgtcgcggtgaatacgttcccgggccttgtacacaccgcccgtcacaccatgggagtgggttgcaccagaagtagctagtctaaccttcggggggacggttaccacggtgtgattcatgactggggtgaagtcgtaacaaggtagccgtaggggaacctgcggctggatcacctcctt

SEQ ID NO: 38 - DNA, 1517 bp, Rhodococcus sp.
  source 1..1517: mol_type = genomic DNA; note = DP38; SBI3498
tacggagagtttgatcctggctcaggacgaacgctggcggcgtgcttaacacatgcaagtcgagcggtaaggcctttcggggtacacgagcggcgaacgggtgagtaacacgtgggtgatctgccctgcactctgggataagcttgggaaactgggtctaataccggatatgaccacagcatgcatgtgttgtggtggaaagatttatcggtgcaggatgggcccgcggcctatcagcttgttggtggggtaatggcctaccaaggcgacgacgggtagccgacctgagagggtgaccggccacactgggactgagacacggcccagactcctacgggaggcagcagtggggaatattgcacaatgggcggaagcctgatgcagcgacgccgcgtgagggatgaaggccttcgggttgtaaacctctttcagcagggacgaagcgtgagtgacggtacctgcagaagaagcaccggctaactacgtgccagcagccgcggtaatacgtagggtgcgagcgttgtccggaattactgggcgtaaagagttcgtaggcggtttgtcgcgtcgtttgtgaaaacccggggctcaacttcgggcttgcaggcgatacgggcagacttgagtgtttcaggggagactggaattcctggtgtagcggtgaaatgcgcagatatcaggaggaacaccggtggcgaaggcgggtctctgggaaacaactgacgctgaggaacgaaagcgtgggtagcaaacaggattagataccctggtagtccacgccgtaaacggtgggcgctaggtgtgggttccttccacgggatctgtgccgtagctaacgcattaagcgccccgcctggggagtacggccgcaaggctaaaactcaaaggaattgacgggggcccgcacaagcggcggagcatgtggattaattcgatgcaacgcgaagaaccttacctgggtttgacatacaccggaaaaccgtagagatacggtcccccttgtggtcggtgtacaggtggtgcatggctgtcgtcagctcgtgtcgtgagatgttgggttaagtcccgcaacgagcgcaacccttgtcttatgttgccagcacgtaatggtggggactcgtaagagactgccggggtcaactcggaggaaggtggggacgacgtcaagtcatcatgccccttatgtccagggcttcacacatgctacaatggccagtacagagggctgcgagaccgtgaggtggagcgaatcccttaaagctggtctcagttcggatcggggtctgcaactcgaccccgtgaagtcggagtcgctagtaatcgcagatcagcaacgctgcggtgaatacgttcccgggccttgtacacaccgcccgtcacgtcatgaaagtcggtaacacccgaagccggtggcctaaccccttacggggagggagccgtcgaaggtgggatcggcgattgggacgaagtcgtaacaaggtagccgtaccggaaggtgcggctggatcacctccttt

SEQ ID NO: 39 - DNA, 1482 bp, Agrobacterium tumefaciens
  source 1..1482: mol_type = genomic DNA; note = DP39; SBI3499
cttgagagtttgatcctggctcagaacgaacgctggcggcaggcttaacacatgcaagtcgaacgccccgcaaggggagtggcagacgggtgagtaacgcgtgggaatctaccgtgccctgcggaatagctccgggaaactggaattaataccgcatacgccctacgggggaaagatttatcggggtatgatgagcccgcgttggattagctagttggtggggtaaaggcctaccaaggcgacgatccatagctggtctgagaggatgatcagccacattgggactgagacacggcccaaactcctacgggaggcagcagtggggaatattggacaatgggcgcaagcctgatccagccatgccgcgtgagtgatgaaggccttagggttgtaaagctctttcaccggagaagataatgacggtatccggagaagaagccccggctaacttcgtgccagcagccgcggtaatacgaagggggctagcgttgttcggaattactgggcgtaaagcgcacgtaggcggatatttaagtcaggggtgaaatcccagagctcaactctggaactgcctttgatactgggtatcttgagtatggaagaggtaagtggaattccgagtgtagaggtgaaattcgtagatattcggaggaacaccagtggcgaaggcggcttactggtccattactgacgctgaggtgcgaaagcgtggggagcaaacaggattagataccctggtagtccacgccgtaaacgatgaatgttagccgtcgggcagtatactgttcggtggcgcagctaacgcattaaacattccgcctggggagtacggtcgcaagattaaaactcaaaggaattgacgggggcccgcacaagcggtggagcatgtggtttaattcgaagcaacgcgcagaaccttaccagctcttgacattcggggtttgggcagtggagacattgtccttcagttaggctggccccagaacaggtgctgcatggctgtcgtcagctcgtgtcgtgagatgttgggttaagtcccgcaacgagcgcaaccctcgcccttagttgccagcatttagttgggcactctaaggggactgccggtgataagccgagaggaaggtggggatgacgtcaagtcctcatggcccttacgggctgggctacacacgtgctacaatggtggtgacagtgggcagcgagacagcgatgtcgagctaatctccaaaagccatctcagttcggattgcactctgcaactcgagtgcatgaagttggaatcgctagtaatcgcagatcagcatgctgcggtgaatacgttcccgggccttgtacacaccgcccgtcacaccatgggagttggttttacccgaaggtagtgcgctaaccgcaaggaggcagctaaccacggtagggtcagcgactggggtgaagtcgtaacaaggtagccgtaggggaacctgcggctggatcacctccttt

SEQ ID NO: 40 - DNA, 903 bp, Pantoea sp.
  source 1..903: mol_type = genomic DNA; note = DP40; SBI3528
ttgacgttacccgcagaagaagcaccggctaactccgtgccagcagccgcggtaatacggagggtgcaagcgttaatcggaattactgggcgtaaagcgcacgcaggcggtctgttaagtcagatgtgaaatccccgggcttaacctgggaactgcatttgaaactggcaggcttgagtcttgtagaggggggtagaattccaggtgtagcggtgaaatgcgtagagatctggaggaataccggtggcgaaggcggccccctggacaaagactgacgctcaggtgcgaaagcgtggggagcaaacaggattagataccctggtagtccacgccgtaaacgatgtcgacttggaggttgttcccttgaggagtggcttccggagctaacgcgttaagtcgaccgcctggggagtacggccgcaaggttaaaactcaaatgaattgacgggggcccgcacaagcggtggagcatgtggtttaattcgatgcaacgcgaagaaccttacctactcttgacatccagagaactttccagagatggattggtgccttcgggaactctgagacaggtgctgcatggctgtcgtcagctcgtgttgtgaaatgttgggttaagtcccgcaacgagcgcaacccttatcctttgttgccagcgcgtgatggcgggaactcaaaggagactgccggtgataaaccggaggaaggtggggatgacgtcaagtcatcatggcccttacgagtagggctacacacgtgctacaatggcgcatacaaagagaagcgacctcgcgagagcaagcggacctcacaaagtgcgtcgtagtccggatcggagtctgcaactcgactccgtgaagtcggaatcgctagtaatcgtggatcagaatgccacggtgaatacgt

SEQ ID NO: 41 - DNA, 1457 bp, Corynebacterium mucifaciens
  source 1..1457: mol_type = genomic DNA; note = DP41; SBI3529
gtggagagtttgatcctggctcaggatgaacgctggcggcgtgcttaacacatgcaagtcgaacggaaaggcccaagcttgcttgggtactcgagtggcgaacgggtgagtaacacgtgggtgatctgccctgcacttcgggataagcctgggaaactgggtctaataccggataggacgatggtttggatgccattgtggaaagttttttcggtgtgggatgagctcgcggcctatcagcttgttggtggggtaatggcctaccaaggcgtcgacgggtagccggcctgagagggtgtacggccacattgggactgagatacggcccagactcctacgggaggcagcagtggggaatattgcacaatgggcgcaagcctgatgcagcgacgccgcgtgggggatgacggccttcgggttgtaaactcctttcgctagggacgaagcgttttgtgacggtacctggagaagaagcaccggctaactacgtgccagcagccgcggtaatacgtagggtgcgagcgttgtccggaattactgggcgtaaagagctcgtaggtggtttgtcgcgtcgtttgtgtaagcccgcagcttaactgcgggactgcaggcgatacgggcataacttgagtgctgtaggggagactggaattcctggtgtagcggtggaatgcgcagatatcaggaggaacaccgatggcgaaggcaggtctctgggcagtaactgacgctgaggagcgaaagcatgggtagcgaacaggattagataccctggtagtccatgccgtaaacggtgggcgctaggtgtgagtcccttccacggggttcgtgccgtagctaacgcattaagcgccccgcctggggagtacggccgcaaggctaaaactcaaaggaattgacgggggcccgcacaagcggcggagcatgtggattaattcgatgcaacgcgaagaaccttacctgggcttgacatacaccagatcgccgtagagatacggtttccctttgtggttggtgtacaggtggtgcatggttgtcgtcagctcgtgtcgtgagatgttgggttaagtcccgcaacgagcgcaacccttgtcttatgttgccagcacgtgatggtggggactcgtgagagactgccggggttaactcggaggaaggtggggatgacgtcaaatcatcatgccccttatgtccagggcttcacacatgctacaatggtcggtacaacgcgcatgcgagcctgtgagggtgagcgaatcgctgtgaaagccggtcgtagttcggattggggtctgcaactcgaccccatgaagtcggagtcgctagtaatcgcagatcagcaacgctgcggtgaatacgttcccgggccttgtacacaccgcccgtcacaccatgggagtgggttgcaaaagaagtaggtagcttaaccttcgggagggcgcttaccactttgtgat

SEQ ID NO: 42 - DNA, 1532 bp, Pseudomonas lundensis
  source 1..1532: mol_type = genomic DNA; note = DP42; SBI3530
tgaagagtttgatcatggctcagattgaacgctggcggcaggcctaacacatgcaagtcgagcggtagagaggtgcttgcacctcttgagagcggcggacgggtgagtaatacctaggaatctgcctgatagtgggggataacgttcggaaacggacgctaataccgcatacgtcctacgggagaaagcaggggaccttcgggccttgcgctatcagatgagcctaggtcggattagctagttggtgaggtaatggctcaccaaggctacgatccgtaactggtctgagaggatgatcagtcacactggaactgagacacggtccagactcctacgggaggcagcagtggggaatattggacaatgggcgaaagcctgatccagccatgccgcgtgtgtgaagaaggtcttcggattgtaaagcactttaagttgggaggaagggcattaacctaatacgttagtgtcttgacgttaccgacagaataagcaccggctaactctgtgccagcagccgcggtaatacagagggtgcaagcgttaatcggaattactgggcgtaaagcgcgcgtaggtggtttgttaagttgaatgtgaaatccccgggctcaacctgggaactgcatccaaaactggcaagctagagtatggtagagggtagtggaatttcctgtgtagcggtgaaatgcgtagatataggaaggaacaccagtggcgaaggcgactacctggactgatactgacactgaggtgcgaaagcgtggggagcaaacaggattagataccctggtagtccacgccgtaaacgatgtcaactagccgttgggaaccttgagttcttagtggcgcagctaacgcattaagttgaccgcctggggagtacggccgcaaggttaaaactcaaatgaattgacgggggcccgcacaagcggtggagcatgtggtttaattcgaagcaacgcgaagaaccttaccaggccttgacatccaatgaactttccagagatggattggtgccttcgggaacattgagacaggtgctgcatggctgtcgtcagctcgtgtcgtgagatgttgggttaagtcccgtaacgagcgcaacccttgtccttagttaccagcacgtaatggtgggcactctaaggagactgccggtgacaaaccggaggaaggtggggatgacgtcaagtcatcatggcccttacggcctgggctacacacgtgctacaatggtcggtacaaagggttgccaagccgcgaggtggagctaatcccataaaaccgatcgtagtccggatcgcagtctgcaactcgactgcgtgaagtcggaatcgctagtaatcgtgaatcagaatgtcacggtgaatacgttcccgggccttgtacacaccgcccgtcacaccatgggagtgggttgcaccagaagtagctagtctaaccctcgggaggacggttaccacggtgtgattcatgactggggtgaagtcgtaacaaggtagccgtaggggaacctgcggctggatcacctcctt

SEQ ID NO: 43 - DNA, 1525 bp, Janthinobacterium sp.
  source 1..1525: mol_type = genomic DNA; note = DP43; SBI3534
ctgagtttgatcctggctcagattgaacgctggcggcatgccttacacatgcaagtcgaacggcagcacggagcttgctctggtggcgagtggcgaacgggtgagtaatatatcggaacgtaccctggagtgggggataacgtagcgaaagttacgctaataccgcatacgatctaaggatgaaagtgggggatcgcaagacctcatgctcgtggagcggccgatatctgattagctagttggtagggtaaaagcctaccaaggcatcgatcagtagctggtctgagaggacgaccagccacactggaactgagacacggtccagactcctacgggaggcagcagtggggaattttggacaatgggcgaaagcctgatccagcaatgccgcgtgagtgaagaaggccttcgggttgtaaagctcttttgtcagggaagaaacggtgagagctaatatctcttgctaatgacggtacctgaagaataagcaccggctaactacgtgccagcagccgcggtaatacgtagggtgcaagcgttaatcggaattactgggcgtaaagcgtgcgcaggcggttttgtaagtctgatgtgaaatccccgggctcaacctgggaattgcattggagactgcaaggctagaatctggcagaggggggtagaattccacgtgtagcagtgaaatgcgtagatatgtggaggaacaccgatggcgaaggcagccccctgggtcaagattgacgctcatgcacgaaagcgtggggagcaaacaggattagataccctggtagtccacgccctaaacgatgtctactagttgtcgggtcttaattgacttggtaacgcagctaacgcgtgaagtagaccgcctggggagtacggtcgcaagattaaaactcaaaggaattgacggggacccgcacaagcggtggatgatgtggattaattcgatgcaacgcgaaaaaccttacctacccttgacatggctggaatccttgagagatcagggagtgctcgaaagagaaccagtacacaggtgctgcatggctgtcgtcagctcgtgtcgtgagatgttgggttaagtcccgcaacgagcgcaacccttgtcattagttgctacgaaagggcactctaatgagactgccggtgacaaaccggaggaaggtggggatgacgtcaagtcctcatggcccttatgggtagggcttcacacgtcatacaatggtacatacagagcgccgccaacccgcgagggggagctaatcgcagaaagtgtatcgtagtccggattgtagtctgcaactcgactgcatgaagttggaatcgctagtaatcgcggatcagcatgtcgcggtgaatacgttcccgggtcttgtacacaccgcccgtcacaccatgggagcgggttttaccagaagtaggtagcttaaccgtaaggagggcgcttaccacggtaggattcgtgactggggtgaagtcgtaacaaggtagccgtatcggaaggtgcggctggatcacctccttt

SEQ ID NO: 44 - DNA, 1497 bp, Herbaspirillum sp.
  source 1..1497: mol_type = genomic DNA; note = DP44; SBI3535
tggcggcatgccttacacatgcaagtcgaacggcagcataggagcttgctcctgatggcgagtggcgaacgggtgagtaatatatcggaacgtgccctagagtgggggataactagtcgaaagactagctaataccgcatacgatctacggatgaaagtgggggatcgcaagacctcatgctcctggagcggccgatatctgattagctagttggtggggtaaaagctcaccaaggcgacgatcagtagctggtctgagaggacgaccagccacactgggactgagacacggcccagactcctacgggaggcagcagtggggaattttggacaatgggggcaaccctgatccagcaatgccgcgtgagtgaagaaggccttcgggttgtaaagctcttttgtcagggaagaaacggttctggataatacctaggactaatgacggtacctgaagaataagcaccggctaactacgtgccagcagccgcggtaatacgtagggtgcaagcgttaatcggaattactgggcgtaaagcgtgcgcaggcggttgtgtaagtcagatgtgaaatccccgggctcaacctgggaattgcatttgagactgcacggctagagtgtgtcagaggggggtagaattccacgtgtagcagtgaaatgcgtagatatgtggaggaataccgatggcgaaggcagccccctgggataacactgacgctcatgcacgaaagcgtggggagcaaacaggattagataccctggtagtccacgccctaaacgatgtctactagttgtcgggtcttaattgacttggtaacgcagctaacgcgtgaagtagaccgcctggggagtacggtcgcaagattaaaactcaaaggaattgacggggacccgcacaagcggtggatgatgtggattaattcgatgcaacgcgaaaaaccttacctacccttgacatggatggaatcccgaagagatttgggagtgctcgaaagagaaccatcacacaggtgctgcatggctgtcgtcagctcgtgtcgtgagatgttgggttaagtcccgcaacgagcgcaacccttgtcattagttgctacgaaagggcactctaatgagactgccggtgacaaaccggaggaaggtggggatgacgtcaagtcctcatggcccttatgggtagggcttcacacgtcatacaatggtacatacagagggccgccaacccgcgagggggagctaatcccagaaagtgtatcgtagtccggattggagtctgcaactcgactccatgaagttggaatcgctagtaatcgcggatcagcatgtcgcggtgaatacgttcccgggtcttgtacacaccgcccgtcacaccatgggagcgggttttaccagaagtgggtagcctaaccgcaaggagggcgctcaccacggtaggattcgtgactggggtgaagtcgtaacaaggtagccgtatcggaaggtgcggctggatcacctccttt

SEQ ID NO: 45 - DNA, 1522 bp, Sanguibacter keddieii
  source 1..1522: mol_type = genomic DNA; note = DP45; SBI3540
tacggagagtttgatcctggctcaggacgaacgctggcggcgtgcttaacacatgcaagtcgaacggtgacgctagagcttgctctggttgatcagtggcgaacgggtgagtaacacgtgagtaacctgcccttgactctgggataactccgggaaaccggggctaataccggatacgagacgcgaccgcatggtcggcgtctggaaagtttttcggtcaaggatggactcgcggcctatcagcttgttggtgaggtaatggctcaccaaggcgtcgacgggtagccggcctgagagggcgaccggccacactgggactgagacacggcccagactcctacgggaggcagcagtggggaatattgcacaatgggcgaaagcctgatgcagcgacgccgcgtgagggatgaaggccttcgggttgtaaacctctttcagtagggaagaagcgaaagtgacggtacctgcagaagaagcgccggctaactacgtgccagcagccgcggtaatacgtagggcgcaagcgttgtccggaattattgggcgtaaagagctcgtaggcggtttgtcgcgtctggtgtgaaaactcaaggctcaaccttgagcttgcatcgggtacgggcagactagagtgtggtaggggtgactggaattcctggtgtagcggtggaatgcgcagatatcaggaggaacaccgatggcgaaggcaggtcactgggccactactgacgctgaggagcgaaagcatggggagcgaacaggattagataccctggtagtccatgccgtaaacgttgggcactaggtgtggggctcattccacgagttccgcgccgcagctaacgcattaagtgccccgcctggggagtacggccgcaaggctaaaactcaaaggaattgacgggggcccgcacaagcggcggagcatgcggattaattcgatgcaacgcgaagaaccttaccaaggcttgacatacaccggaatcatgcagagatgtgtgcgtcttcggactggtgtacaggtggtgcatggttgtcgtcagctcgtgtcgtgagatgttgggttaagtcccgcaacgagcgcaaccctcgtcctatgttgccagcacgttatggtggggactcataggagactgccggggtcaactcggaggaaggtggggatgacgtcaaatcatcatgccccttatgtcttgggcttcacgcatgctacaatggccggtacaaagggctgcgataccgcgaggtggagcgaatcccaaaaagccggtctcagttcggattggggtctgcaactcgaccccatgaagtcggagtcgctagtaatcgcagatcagcaacgctgcggtgaatacgttcccgggccttgtacacaccgcccgtcaagtcacgaaagtcggtaacacccgaagccggtggcctaaccccttgtgggatggagccgtcgaaggtgggattggcgattgggactaagtcgtaacaaggtagccgtaccggaaggtgcggctggatcacctccttt

SEQ ID NO: 46 - DNA, 831 bp, Pantoea agglomerans
  source 1..831: mol_type = genomic DNA; note = DP46; SBI3553
ttgaagagtttgatcatggctcagattgaacgctggcggcaggcctaacacatgcaagtcggacggtagcacagaggagcttgctccttgggtgacgagtggcggacgggtgagtaatgtctggggatctgcccgatagagggggataaccactggaaacggtggctaataccgcataacgtcgcaagaccaaagagggggaccttcgggcctctcactatcggatgaacccagatgggattagctagtaggcggggtaatggcccacctaggcgacgatccctagctggtctgagaggatgaccagccacactggaactgagacacggtccagactcctacgggaggcagcagtggggaatattgcacaatgggcgcaagcctgatgcagccatgccgcgtgtatgaagaaggccttcgggttgtaaagtactttcagcggggaggaaggcgacagggttaataaccctgtcgattgacgttacccgcagaagaagcaccggctaactccgtgccagcagccgcggtaatacggagggtgcaagcgttaatcggaattactgggcgtaaagcgcacgcaggcggtctgttaagtcagatgtgaaatccccgggcttaacctgggaactgcatttgaaactggcaggctttagtcttgtagagtggggtagaattccaggtgtagcggtgaaatgcgtagagatgtggaggaacaccagtggcgaaggcggctttttggtctgtaactgacgctgaggcgcgaaagcgtggggagcaaacaggattagataccctggtagtccacgccgtaaacgatgagtgctaagtgtt

SEQ ID NO: 47 - DNA, 960 bp, Cronobacter dublinensis
  source 1..960: mol_type = genomic DNA; note = DP47; SBI3555
agggtgcaagcgttaatcggaattactgggcgtaaagcgcgcgtaggtggtttgttaagttgaatgtgaaatccccgggctcaacctgggaactgcatttgaaactggcaagctagagtctcgtagaggggggtagaattccaggtgtagcggtgaaatgcgtagagatctggaggaataccggtggcgaaggcggccccctggacgaagactgacgctcaggtgcgaaagcgtggggagcaaacaggattagataccctggtagtccacgccgtaaacgatgtcaactagccgttggaagccttgagcttttagtggcgcagctaacgcattaagttgaccgcctggggagtacggccgcaaggttaaaactcaaatgaattgacgggggcccgcacaagcggtggagcatgtggtttaattcgaagcaacgcgaagaaccttaccaggccttgacatccaatgaactttctagagatagattggtgccttcgggaacattgagacaggtgctgcatggctgtcgtcagctcgtgtcgtgagatgttgggttaagtcccgcaacgagcgcaacccttgtcctgtgttgccagcgcgtaatggcggggactcgcaggagactgccggggtcaactcggaggaaggtggggatgacgtcaaatcatcatgccccttatgtcttgggcttcacgcatgctacaatggccggtacaaagggctgcaataccgtgaggtggagcgaatcccaaaaagccggtcccagttcggattgaggtctgcaactcgacctcatgaagtcggagtcgctagtaatcgcagatcagcaacgctgcggtgaatacgttcccgggtcttgtacacaccgcccgtcaagtcatgaaagtcggtaacacctgaagccggtggcccaacccttgtggagggagccgtcgaaggtgggatcggtaattaggactaagt

SEQ ID NO: 48 - DNA, 1548 bp, Bacillus paralicheniformis
  source 1..1548: mol_type = genomic DNA; note = DP48; SBI3606
catggagagtttgatcctggctcaggacgaacgctggcggcgtgcctaatacatgcaagtcgagcggacagatgggagcttgctccctgatgttagcggcggacgggtgagtaacacgtgggtaacctgcctgtaagactgggataactccgggaaaccggggctaataccggatgcttgattgaaccgcatggttcaattataaaaggtggcttttagctaccacttacagatggacccgcggcgcattagctagttggtgaggtaacggctcaccaaggcaacgatgcgtagccgacctgagagggtgatcggccacactgggactgagacacggcccagactcctacgggaggcagcagtagggaatcttccgcaatggacgaaagtctgacggagcaacgccgcgtgagtgatgaaggttttcggatcgtaaaactctgttgttagggaagaacaagtaccgttcgaatagggcggtaccttgacggtacctaaccagaaagccacggctaactacgtgccagcagccgcggtaatacgtaggtggcaagcgttgtccggaattattgggcgtaaagcgcgcgcaggcggtttcttaagtctgatgtgaaagcccccggctcaaccggggagggtcattggaaactggggaacttgagtgcagaagaggagagtggaattccacgtgtagcggtgaaatgcgtagagatgtggaggaacaccagtggcgaaggcgactctctggtctgtaactgacgctgaggcgcgaaagcgtggggagcgaacaggattagataccctggtagtccacgccgtaaacgatgagtgctaagtgttagagggtttccgccctttagtgctgcagcaaacgcattaagcactccgcctggggagtacggtcgcaagactgaaactcaaaggaattgacgggggcccgcacaagcggtggagcatgtggtttaattcgaagcaacgcgaagaaccttaccaggtcttgacatcctctgacaaccctagagatagggcttccccttcgggggcagagtgacaggtggtgcatggttgtcgtcagctcgtgtcgtgagatgttgggttaagtcccgcaacgagcgcaacccttgatcttagttgccagcattcagttgggcactctaaggtgactgccggtgacaaaccggaggaaggtggggatgacgtcaaatcatcatgccccttatgacctgggctacacacgtgctacaatgggcagaacaaagggcagcgaagccgcgaggctaagccaatcccacaaatctgttctcagttcggatcgcagtctgcaactcgactgcgtgaagctggaatcgctagtaatcgcggatcagcatgccgcggtgaatacgttcccgggccttgtacacaccgcccgtcacaccacgagagtttgtaacacccgaagtcggtgaggtaaccttttggagccagccgccgaaggtgggacagatgattggggtgaagtcgtaacaaggtagccgtatcggaaggtgcggctggatcacctccttt

SEQ ID NO: 49 - DNA, 1551 bp, Bacillus gibsonii
  source 1..1551: mol_type = genomic DNA; note = DP49; SBI3609
tatggagagtttgatcctggctcaggacgaacgctggcggcgtgcctaatacatgcaagtcgagcggacgtttttgaagcttgcttcaaaaacgttagcggcggacgggtgagtaacacgtgggcaacctgccttatcgactgggataactccgggaaaccggggctaataccggataatatctagcacctcctggtgcaagattaaaagagggccttcgggctctcacggtgagatgggcccgcggcgcattagctagttggagaggtaatggctccccaaggcgacgatgcgtagccgacctgagagggtgatcggccacactgggactgagacacggcccagactcctacgggaggcagcagtagggaatcttccgcaatggacgaaagtctgacggagcaacgccgcgtgagtgatgaagggtttcggctcgtaaagctctgttatgagggaagaacacgtaccgttcgaatagggcggtaccttgacggtacctcatcagaaagccacggctaactacgtgccagcagccgcggtaatacgtaggtggcaagcgttgtccggaattattgggcgtaaagcgcgcgcaggcggccttttaagtctgatgtgaaatcttgcggctcaaccgcaagcggtcattggaaactgggaggcttgagtacagaagaggagagtggaattccacgtgtagcggtgaaatgcgtagatatgtggaggaacaccagtggcgaaggcgactctctggtctgtaactgacgctgaggcgcgaaagcgtggggagcaaacaggattagataccctggtagtccacgccgtaaacgatgagtgctaggtgttaggggtttcgatgcccgtagtgccgaagttaacacattaagcactccgcctggggagtacggccgcaaggctgaaactcaaaggaattgacgggggcccgcacaagcagtggagcatgtggtttaattcgaagcaacgcgaagaaccttaccaggtcttgacatcctttgaccactctggagacagagcttccccttcgggggcaaagtgacaggtggtgcatggttgtcgtcagctcgtgtcgtgagatgttgggttaagtcccgcaacgagcgcaacccttgaccttagttgccagcatttagttgggcactctaaggtgactgccggtgacaaaccggaggaaggtggggatgacgtcaaatcatcatgccccttatgacctgggctacacacgtgctacaatggatggtacaaagggttgcgaagccgcgaggtgaagccaatcccataaagccattctcagttcggattgtaggctgcaactcgcctgcatgaagctggaattgctagtaatcgcggatcagcatgccgcggtgaatacgttcccgggccttgtacacaccgcccgtcacaccacgagagtttgtaacacccgaagtcggtgaggtaaccttttggagccagccgccgaaggtgggacagatgattggggtgaagtcgtaacaaggtagccgtatcggaaggtgcggctggatcacctccttt

SEQ ID NO: 50 - DNA, 1536 bp, Enterobacter sp.
  source 1..1536: mol_type = genomic DNA; note = DP50; SBI3639
ttgaagagtttgatcatggctcagattgaacgctggcggcaggcctaacacatgcaagtcgaacggtagcacagagagcttgctcttgggtgacgagtggcggacgggtgagtaatgtctgggaaactgcccgatggagggggataactactggaaacggtagctaataccgcataacgtcgcaagaccaaagtgggggaccttcgggcctcacaccatcggatgtgcccagatgggattagctagtaggtggggtaatggctcacctaggcgacgatccctagctggtctgagaggatgaccagccacactggaactgagacacggtccagactcctacgggaggcagcagtggggaatattgcacaatgggcgcaagcctgatgcagccatgccgcgtgtatgaagaaggccttcgggttgtaaagtactttcagcgaggaggaaggcattgtggttaataaccgcagtgattgacgttactcgcagaagaagcaccggctaactccgtgccagcagccgcggtaatacggagggtgcaagcgttaatcggaattactgggcgtaaagcgcacgcaggcggtctgtcaagtcggatgtgaaatccccgggctcaacctgggaactgcattcgaaactggcaggctagagtcttgtagaggggggtagaattccaggtgtagcggtgaaatgcgtagagatctggaggaataccggtggcgaaggcggccccctggacaaagactgacgctcaggtgcgaaagcgtggggagcaaacaggattagataccctggtagtccacgccgtaaacgatgtcgacttggaggttgtgcccttgaggcgtggcttccggagctaacgcgttaagtcgaccgcctggggagtacggccgcaaggttaaaactcaaatgaattgacgggggcccgcacaagcggtggagcatgtggtttaattcgatgcaacgcgaagaaccttacctactcttgacatccacggaatttagcagagatgctttagtgccttcgggaaccgtgagacaggtgctgcatggctgtcgtcagctcgtgttgtgaaatgttgggttaagtcccgcaacgagcgcaacccttatcctttgttgccagcggttcggccgggaactcaaaggagactgccagtgataaactggaggaaggtggggatgacgtcaagtcatcatggcccttacgagtagggctacacacgtgctacaatggcatatacaaagagaagcgacctcgcgagagcaagcggacctcataaagtatgtcgtagtccggatcggagtctgcaactcgactccgtgaagtcggaatcgctagtaatcgtagatcagaatgctacggtgaatacgttcccgggccttgtacacaccgcccgtcacaccatgggagtgggttgcaaaagaagtaggtagcttaaccttcgggagggcgcttaccactttgtgattcatgactggggtgaagtcgtaacaaggtaaccgtaggggaacctgcggttggatcacctcctt

SEQ ID NO: 51 - DNA, 1537 bp, Klebsiella aerogenes
  source 1..1537: mol_type = genomic DNA; note = DP51; SBI3640
ttgaagagtttgatcatggctcagattgaacgctggcggcaggcctaacacatgcaagtcgagcggtagcacagggagcttgctcctgggtgacgagcggcggacgggtgagtaatgtctgggaaactgcctgatggagggggataactactggaaacggtagctaataccgcataacgtcgcaagaccaaagagggggaccttcgggcctcttgccatcagatgtgcccagatgggattagctagtaggtgaggtaatggctcacctaggcgacgatccctagctggtctgagaggatgaccagccacactggaactgagacacggtccagactcctacgggaggcagcagtggggaatattgcacaatgggcgcaagcctgatgcagccatgccgcgtgtatgaagaaggccttcgggttgtaaagtactttcagcgaggaggaaggcattaaggttaataaccttggtgattgacgttactcgcagaagaagcaccggctaactccgtgccagcagccgcggtaatacggggggtgcaagcgttaatcggaattactgggcgtaaagcgcacgcaggcggtttgtcaagtcggatgtgaaatccccgggctcaacctgggaactgcattcgaaacgggcaagctagagtcttgtagaggggggtagaattccaggtgtagcggtgaaatgcgtagagatctggaggaataccggtggcgaaggcggccccctggacaaagactgacgctcaggtgcgaaagcgtggggagcaaacaggattagataccctggtagtccacgccgtaaacgatgtcgacttggaggttgtgcccttgaggcgtggcttccggagctaacgcgttaagtcgaccgcctggggagtacggccgcaaggttaaaactcaaatgaattgacgggggcccgcacaagcggtggagcatgtggtttaattcgatgcaacgcgaagaaccttacctactcttgacatccagagaactttccagagatggattggtgccttcgggaactctgagacaggtgctgcatggctgtcgtcagctcgtgttgtgaaatgttgggttaagtcccgcaacgagcgcaacccttatcctttgttgccagcgagtaatgtcgggaactcaaaggagactgccagtgacaaactggaggaaggtggggatgacgtcaagtcatcatggcccttacgagtagggctacacacgtgctacaatggcatatacaaagagaagcgacctcgcgagagcaagcggacctcacaaagtatgtcgtagtccggatcggagtctgcaactcgactccgtgaagtcggaatcgctagtaatcgtagatcagaatgctacggtgaatacgttcccgggccttgtacacaccgcccgtcacaccatgggagtgggttgcaaaagaagtaggtagcttaaccttcgggagggcgcttaccactttgtgattcatgactggggtgaagtcgtaacaaggtaaccgtaggggaacctgcggttggatcacctcctt

SEQ ID NO: 52 - DNA, 1517 bp, Arthrobacter sp.
  source 1..1517: mol_type = genomic DNA; note = DP52; SBI3641
acggagagtttgatcctggctcaggatgaacgctggcggcgtgcttaacacatgcaagtcgaacgatgatcccagcttgctgggggattagtggcgaacgggtgagtaacacgtgagtaacctgcccttgactctgggataagcctgggaaactgggtctaataccggatatgactgtctgacgcatgtcaggtggtggaaagcttttgtggttttggatggactcgcggcctatcagcttgttggtggggtaatggcctaccaaggcgacgacgggtagccggcctgagagggtgaccggccacactgggactgagacacggcccagactcctacgggaggcagcagtggggaatattgcacaatgggcgcaagcctgatgcagcgacgccgcgtgagggatgacggccttcgggttgtaaacctctttcagtagggaagaagcgaaagtgacggtacctgcagaagaagcgccggctaactacgtgccagcagccgcggtaatacgtagggcgcaagcgttatccggaattattgggcgtaaagagctcgtaggcggtttgtcgcgtctgctgtgaaagaccggggctcaactccggttctgcagtgggtacgggcagactagagtgcagtaggggagactggaattcctggtgtagcggtgaaatgcgcagatatcaggaggaacaccgatggcgaaggcaggtctctgggctgtaactgacgctgaggagcgaaagcatggggagcgaacaggattagataccctggtagtccatgccgtaaacgttgggcactaggtgtgggggacattccacgttttccgcgccgtagctaacgcattaagtgccccgcctggggagtacggccgcaaggctaaaactcaaaggaattgacgggggcccgcacaagcggcggagcatgcggattaattcgatgcaacgcgaagaaccttaccaaggcttgacatgaaccggtaatacctggaaacaggtgccccgcttgcggtcggtttacaggtggtgcatggttgtcgtcagctcgtgtcgtgagatgttgggttaagtcccgcaacgagcgcaaccctcgttctatgttgccagcgcgttatggcggggactcataggagactgccggggtcaactcggaggaaggtggggacgacgtcaaatcatcatgccccttatgtcttgggcttcacgcatgctacaatggccggtacaaagggttgcgatactgtgaggtggagctaatcccaaaaagccggtctcagttcggattggggtctgcaactcgaccccatgaagtcggagtcgctagtaatcgcagatcagcaacgctgcggtgaatacgttcccgggccttgtacacaccgcccgtcaagtcacgaaagttggtaacacccgaagccggtggcctaacccttgtggggggagccgtcgaaggtgggaccggcgattgggactaagtcgtaacaaggtagccgtaccggaaggtgcggctggatcacctccttt

SEQ ID NO: 53 - DNA, 1406 bp, Pseudomonas fragi
  source 1..1406: mol_type = genomic DNA; note = DP53; SBI3643
tgaagagtttgatcatggctcagattgaacgctggcggcaggcctaacacatgcaagtcgagcggtagagagaagcttgcttctcttgagagcggcggacgggtgagtaatacctaggaatctgcctgatagtgggggataacgttcggaaacggacgctaataccgcatacgtcctacgggagaaagcaggggaccttcgggccttgcgctatcagatgagcctaggtcggattagctagttggtgaggtaatggctcaccaaggctacgatccgtaactggtctgagaggatgatcagtcacactggaactgagacacggtccagactcctacgggaggcagcagtggggaatattggacaatgggcgaaagcctgatccagccatgccgcgtgtgtgaagaaggtcttcggattgtaaagcactttaagttgggaggaagggcagttacctaatacgtgattgtcttgacgttaccgacagaataagcaccggctaactctgtgccagcagccgcggtaatacagagggtgcaagcgttaatcggaattactgggcgtaaagcgcgcgtaggtggtttgttaagttgaatgtgaaatccccgggctcaacctgggaactgcatccaaaactggcaagctagagtatggtagagggtagtggaatttcctgtgtagcggtgaaatgcgtagatataggaaggaacaccagtggcgaaggcgactacctggactgatactgacactgaggtgcgaaagcgtggggagcaaacaggattagataccctggtagtccacgccgtaaacgatgtcaactagccgttgggagtcttgaactcttagtggcgcagctaacgcattaagttgaccgcctggggagtacggccgcaaggttaaaactcaaatgaattgacgggggcccgcacaagcggtggagcatgtggtttaattcgaagcaacgcgaagaaccttaccaggccttgacatccaatgaactttctagagatagattggtgccttcgggaacattgagacaggtgctgcatggctgtcgtcagctcgtgtcgtgagatgttgggttaagtcccgtaacgagcgcaacccttgtccttagttaccagcacgtaatggtgggcactctaaggagactgccggtgacaaaccggaggaaggtggggatgacgtcaagtcatcatggcccttacggcctgggctacacacgtgctacaatggtcggtacaaagggttgccaagccgcgaggtggagctaatcccataaaaccgatcgtagtccggatcgcagtctgcaactcgactgcgtgaagtcggaatcgctagtaatcgtgaatcagaatgtcacggtgaatacgttcccgggccttgtacacaccgcccgtcacaccatg

SEQ ID NO: 54 - DNA, 1136 bp, Methylobacterium adhaesivum
  source 1..1136: mol_type = genomic DNA; note = DP54; SBI3659
cttgagagtttgatcctggctcagagcgaacgctggcggcaggcttaacacatgcaagtcgagcgggcaccttcgggtgtcagcggcagacgggtgagtaacacgtgggaacgtacccttcggttcggaataacgctgggaaactagcgctaataccggatacgcccttttggggaaaggtttactgccgaaggatcggcccgcgtctgattagctagttggtggggtaacggcctaccaaggcgacgatcagtagctggtctgagaggatgatcagccacactgggactgagacacggcccagactcctacgggaggcagcagtggggaatattggacaatgggcgcaagcctgatccagccatgccgcgtgagtgatgaaggccttagggttgtaaagctcttttgtccgggacgataatgacggtaccggaagaataagccccggctaacttcgtgccagcagccgcggtaatacgaagggggctagcgttgctcggaatcactgggcgtaaagggcgcgtaggcggccattcaagtcgggggtgaaagcctgtggctcaaccacagaattgccttcgatactgtttggcttgagtttggtagaggttggtggaactgcgagtgtagaggtgaaattcgtagatattcgcaagaacaccagtggcgaaggcggccaactggaccaatactgacgctgaggcgcgaaagcgtggggagcaaacaggattagataccctggtagtccacgccgtaaacgatgaatgctagctgttggggtgcttgcacctcagtagcgcagctaacgctttaagcattccgcctggggagtacggtcgcaagattaaaactcaaaggaattgacgggggcccgcacaagcggtggagcatgtggtttaattcgaagcaacgcgcagaaccttaccatcccttgacatgtcgtgccatccggagagatccggggttcccttcggggacgcgaacacaggtgctgcatggctgtcgtcagctcgtgtcgtgagatgttgggttaagtcccgcaacgagcgcaacccacgtccttagttgccatcatttagttgggcactctagggagactgccggtgataagccgcgaggaaggtgtggatgacgtc

SEQ ID NO: 55 - DNA, 1374 bp, Bacillus megaterium
  source 1..1374: mol_type = genomic DNA; note = DP55; SBI3670
tcggagagtttgatcctggctcaggatgaacgctggcggcgtgcctaatacatgcaagtcgagcgaactgattagaagcttgcttctatgacgttagcggcggacgggtgagtaacacgtgggcaacctgcctgtaagactgggataacttcgggaaaccgaagctaataccggataggatcttctccttcatgggagatgattgaaagatggtttcggctatcacttacagatgggcccgcggtgcattagctagttggtgaggtaacggctcaccaaggcaacgatgcatagccgacctgagagggtgatcggccacactgggactgagacacggcccagactcctacgggaggcagcagtagggaatcttccgcaatggacgaaagtctgacggagcaacgccgcgtgagtgatgaaggctttcgggtcgtaaaactctgttgttagggaagaacaagtacaagagtaactgcttgtaccttgacggtacctaaccagaaagccacggctaactacgtgccagcagccgcggtaatacgtaggtggcaagcgttatccggaattattgggcgtaaagcgcgcgcaggcggtttcttaagtctgatgtgaaagcccacggctcaaccgtggagggtcattggaaactggggaacttgagtgcagaagagaaaagcggaattccacgtgtagcggtgaaatgcgtagagatgtggaggaacaccagtggcgaaggcggctttttggtctgtaactgacgctgaggcgcgaaagcgtggggagcaaacaggattagataccctggtagtccacgccgtaaacgatgagtgctaagtgttagagggtttccgccctttagtgctgcagctaacgcattaagcactccgcctggggagtacggtcgcaagactgaaactcaaaggaattgacgggggcccgcacaagcggtggagcatgtggtttaattcgaagcaacgcgaagaaccttaccaggtcttgacatcctctgacaactctagagatagagcgttccccttcgggggacagagtgacaggtggtgcatggttgtcgtcagctcgtgtcgtgagatgttgggttaagtcccgcaacgagcgcaacccttgatcttagttgccagcatttagttgggcactctaaggtgactgccggtgacaaaccggaggaaggtggggatgacgtcaaatcatcatgccccttatgacctgggctacacacgtgctacaatggatggtacaaagggctgcaagaccgcgaggtcaagccaatcccataaaaccattctcagttcggattgtaggctgcaactcgcctacatgaagctggaatcgctagtaatcgcggatcagcatgct

SEQ ID NO: 56 - DNA, 1554 bp, Paenibacillus lautus
  source 1..1554: mol_type = genomic DNA; note = DP56; SBI3672
attggagagtttgatcctggctcaggacgaacgctggcggcgtgcctaatacatgcaagtcgagcggacctgatggagtgcttgcactcctgatggttagcggcggacgggtgagtaacacgtaggcaacctgccctcaagactgggataactaccggaaacggtagctaataccggataatttatttcacagcattgtggaataatgaaagacggagcaatctgtcacttggggatgggcctgcggcgcattagctagttggtggggtaacggctcaccaaggcgacgatgcgtagccgacctgagagggtgaacggccacactgggactgagacacggcccagactcctacgggaggcagcagtagggaatcttccgcaatgggcgaaagcctgacggagcaacgccgcgtgagtgatgaaggttttcggatcgtaaagctctgttgccaaggaagaacgtcttctagagtaactgctaggagagtgacggtacttgagaagaaagccccggctaactacgtgccagcagccgcggtaatacgtagggggcaagcgttgtccggaattattgggcgtaaagcgcgcgcaggcggttctttaagtctggtgtttaaacccgaggctcaacttcgggtcgcactggaaactggggaacttgagtgcagaagaggagagtggaattccacgtgtagcggtgaaatgcgtagatatgtggaggaacaccagtggcgaaggcgactctctgggctgtaactgacgctgaggcgcgaaagcgtggggagcaaacaggattagataccctggtagtccacgccgtaaacgatgaatgctaggtgttaggggtttcgatacccttggtgccgaagttaacacattaagcattccgcctggggagtacggtcgcaagactgaaactcaaaggaattgacggggacccgcacaagcagtggagtatgtggtttaattcgaagcaacgcgaagaaccttaccaagtcttgacatccctctgaatcctctagagatagaggcggccttcgggacagaggtgacaggtggtgcatggttgtcgtcagctcgtgtcgtgagatgttgggttaagtcccgcaacgagcgcaacccttgattttagttgccagcacatcatggtgggcactctagaatgactgccggtgacaaaccggaggaaggcggggatgacgtcaaatcatcatgccccttatgacttgggctacacacgtactacaatggctggtacaacgggaagcgaagccgcgaggtggagccaatcctataaaagccagtctcagttcggattgcaggctgcaactcgcctgcatgaagtcggaattgctagtaatcgcggatcagcatgccgcggtgaatacgttcccgggtcttgtacacaccgcccgtcacaccacgagagtttacaacacccgaagtcggtggggtaacccgcaagggagccagccgccgaaggtggggtagatgattggggtgaagtcgtaacaaggtagccgtatcggaaggtgcggctggatcacctccttt

SEQ ID NO: 57 - DNA, 1550 bp, Bacillus mycoides
  source 1..1550: mol_type = genomic DNA; note = DP57; SBI3758
attggagagtttgatcctggctcaggatgaacgctggcggcgtgcctaatacatgcaagtcgagcgaatggattaagagcttgctcttatgaagttagcggcggacgggtgagtaacacgtgggtaacctgcccataagactgggataactccgggaaaccggggctaataccggataacattttgcaccgcatggtgcgaaattcaaaggcggcttcggctgtcacttatggatggacccgcgtcgcattagctagttggtgaggtaacggctcaccaaggcaacgatgcgtagccgacctgagagggtgatcggccacactgggactgagacacggcccagactcctacgggaggcagcagtagggaatcttccgcaatggacgaaagtctgacggagcaacgccgcgtgagtgatgaaggctttcgggtcgtaaaactctgttgttagggaagaacaagtgctagttgaataagctggcaccttgacggtacctaaccagaaagccacggctaactacgtgccagcagccgcggtaatacgtaggtggcaagcgttatccggaattattgggcgtaaagcgcgcgcaggtggtttcttaagtctgatgtgaaagcccacggctcaaccgtggagggtcattggaaactgggagacttgagtgcagaagaggaaagtggaattccatgtgtagcggtgaaatgcgtagagatatggaggaacaccagtggcgaaggcgactttctggtctgtaactgacactgaggcgcgaaagcgtggggagcaaacaggattagataccctggtagtccacgccgtaaacgatgagtgctaagtgttagagggtttccgccctttagtgctgaagttaacgcattaagcactccgcctggggagtacggccgcaaggctgaaactcaaaggaattgacgggggcccgcacaagcggtggagcatgtggtttaattcgaagcaacgcgaagaaccttaccaggtcttgacatcctctgacaaccctagagatagggcttccccttcgggggcagagtgacaggtggtgcatggttgtcgtcagctcgtgtcgtgagatgttgggttaagtcccgcaacgagcgcaacccttgatcttagttgccatcattaagttgggcactctaaggtgactgccggtgacaaaccggaggaaggtggggatgacgtcaaatcatcatgccccttatgacctgggctacacacgtgctacaatggacggtacaaagagctgcaagaccgcgaggtggagctaatctcataaaaccgttctcagttcggattgtaggctgcaactcgcctacatgaagctggaatcgctagtaatcgcggatcagcatgccgcggtgaatacgttcccgggccttgtacacaccgcccgtcacaccacgagagtttgtaacacccgaagtcggtggggtaacctttttggagccagccgcctaaggtgggacagatgattggggtgaagtcgtaacaaggtagccgtatcggaaggtgcggctggatcacctccttt

SEQ ID NO: 58 - DNA, 1060 bp, Janthinobacterium svalbardensis
  source 1..1060: mol_type = genomic DNA; note = DP58; SBI3770
aatgacggtacctgaagaataagcaccggctaactacgtgccagcagccgcggtaatacgtagggtgcaagcgttaatcggaattactgggcgtaaagcgtgcgcaggcggttttgtaagtctgatgtgaaatccccgggctcaacctgggaattgcattggagactgcaaggctagaatctggcagaggggggtagaattccacgtgtagcagtgaaatgcgtagatatgtggaggaacaccgatggcgaaggcagccccctgggtcaagattgacgctcatgcacgaaagcgtggggagcaaacaggattagataccctggtagtccacgccctaaacgatgtctactagttgtcgggtcttaattgacttggtaacgcagctaacgcgtgaagtagaccgcctggggagtacggtcgcaagattaaaactcaaaggaattgacggggacccgcacaagcggtggatgatgtggattaattcgatgcaacgcgaaaaaccttacctacccttgacatggctggaatcctcgagagattggggagtgctcgaaagagaaccagtacacaggtgctgcatggctgtcgtcagctcgtgtcgtgagatgttgggttaagtcccgcaacgagcgcaacccttgtcattagttgctacgaaagggcactctaatgagactgccggtgacaaaccggaggaaggtggggatgacgtcaagtcctcatggcccttatgggtagggcttcacacgtcatacaatggtacatacagagcgccgccaacccgcgagggggagctaatcgcagaaagtgtatcgtagtccggattgtagtctgcaactcgactgcatgaagttggaatcgctagtaatcgcggatcagcatgtcgcggtgaatacgttcccgggtcttgtacacaccgcccgtcacaccatgggagcgggttttaccagaagtaggtagcttaaccgtaaggagggcgcttaccacggtaggattcgtgactggggtgaagtcgtaacaaggtagccgtatcggaaggtgcggctggatcacctccttt

SEQ ID NO: 59 - DNA, 1538 bp, Kosakonia cowanii
  source 1..1538: mol_type = genomic DNA; note = DP59; SBI3772
ttgaagagtttgatcatggctcagattgaacgctggcggcaggcctaacacatgcaagtcgaacggtaacaggaagcagcttgctgctttgctgacgagtggcggacgggtgagtaatgtctgggaaactgcctgatggagggggataactactggaaacggtagctaataccgcataacgtcgcaagaccaaagagggggaccttcgggcctcttgccatcagatgtgcccagatgggattagctagtaggtggggtaacggctcacctaggcgacgatccctagctggtctgagaggatgaccagccacactggaactgagacacggtccagactcctacgggaggcagcagtggggaatattgcacaatgggcgcaagcctgatgcagccatgccgcgtgtatgaagaaggccttcgggttgtaaagtactttcagcggggaggaaggcgatgcggttaataaccgcgtcgattgacgttacccgcagaagaagcaccggctaactccgtgccagcagccgcggtaatacggagggtgcaagcgttaatcggaattactgggcgtaaagcgcacgcaggcggtctgtcaagtcggatgtgaaatccccgggctcaacctgggaactgcatccgaaactggcaggcttgagtctcgtagaggggggtagaattccaggtgtagcggtgaaatgcgtagagatctggaggaataccggtggcgaaggcggccccctggacgaagactgacgctcaggtgcgaaagcgtggggagcaaacaggattagataccctggtagtccacgccgtaaacgatgtcgacttggaggttgtgcccttgaggcgtggcttccggagctaacgcgttaagtcgaccgcctggggagtacggccgcaaggttaaaactcaaatgaattgacgggggcccgcacaagcggtggagcatgtggtttaattcgatgcaacgcgaagaaccttacctggtcttgacatccacagaacttggcagagatgccttggtgccttcgggaactgtgagacaggtgctgcatggctgtcgtcagctcgtgttgtgaaatgttgggttaagtcccgcaacgagcgcaacccttatcctttgttgccagcggttaggccgggaactcaaaggagactgccagtgataaactggaggaaggtggggatgacgtcaagtcatcatggcccttacgaccagggctacacacgtgctacaatggcgcatacaaagagaagcgatctcgcgagagccagcggacctcataaagtgcgtcgtagtccggattggagtctgcaactcgactccatgaagtcggaatcgctagtaatcgtgaatcagaatgtcacggtgaatacgttcccgggccttgtacacaccgcccgtcacaccatgggagtgggttgcaaaagaagtaggtagcttaaccttcgggagggcgcttaccactttgtgattcatgactggggtgaagtcgtaacaaggtaaccgtaggggaacctgcggttggatcacctcctt

SEQ ID NO: 60 - DNA, 1547 bp, Bacillus simplex
  source 1..1547: mol_type = genomic DNA; note = DP60; SBI3819
tcggagagtttgatcctggctcaggacgaacgctggcggcgtgcctaatacatgcaagtcgagcgaatcgatgggagcttgctccctgagattagcggcggacgggtgagtaacacgtgggcaacctgcctataagactgggataacttcgggaaaccggagctaataccggatacgttcttttctcgcatgagagaagatggaaagacggttttgctgtcacttatagatgggcccgcggcgcattagctagttggtgaggtaatggctcaccaaggcgacgatgcgtagccgacctgagagggtgatcggccacactgggactgagacacggcccagactcctacgggaggcagcagtagggaatcttccgcaatggacgaaagtctgacggagcaacgccgcgtgaacgaagaaggccttcgggtcgtaaagttctgttgttagggaagaacaagtaccagagtaactgctggtaccttgacggtacctaaccagaaagccacggctaactacgtgccagcagccgcggtaatacgtaggtggcaagcgttgtccggaattattgggcgtaaagcgcgcgcaggtggttccttaagtctgatgtgaaagcccacggctcaaccgtggagggtcattggaaactggggaacttgagtgcagaagaggaaagtggaattccaagtgtagcggtgaaatgcgtagagatttggaggaacaccagtggcgaaggcgactttctggtctgtaactgacactgaggcgcgaaagcgtggggagcaaacaggattagataccctggtagtccacgccgtaaacgatgagtgctaagtgttagagggtttccgccctttagtgctgcagctaacgcattaagcactccgcctggggagtacggccgcaaggctgaaactcaaaggaattgacgggggcccgcacaagcggtggagcatgtggtttaattcgaagcaacgcgaagaaccttaccaggtcttgacatcctctgacaaccctagagatagggcgttccccttcgggggacagagtgacaggtggtgcatggttgtcgtcagctcgtgtcgtgagatgttgggttaagtcccgcaacgagcgcaacccttgatcttagttgccagcattcagttgggcactctaaggtgactgccggtgacaaaccggaggaaggtggggatgacgtcaaatcatcatgccccttatgacctgggctacacacgtgctacaatggatggtacaaagggctgcaaacctgcgaaggtaagcgaatcccataaagccattctcagttcggattgtaggctgcaactcgcctacatgaagccggaatcgctagtaatcgcggatcagcatgccgcggtgaatacgttcccgggccttgtacacaccgcccgtcacaccacgagagtttgtaacacccgaagtcggtgaggtaacctttatggagccagccgcctaaggtgggacagatgattggggtgaagtcgtaacaaggtagccgtatcggaaggtgcggctggatcacctccttt

SEQ ID NO: 61 - DNA, 962 bp, Lelliottia sp.
  source 1..962: mol_type = genomic DNA; note = DP61; SBI4018
ggaaggcggtctgtcaagtcggatgtgaaatccccgggctcaacctgggaactgcattcgaaactggcaggctagagtcttgtagaggggggtagaattccaggtgtagcggtgaaatgcgtagagatctggaggaataccggtggcgaaggcggccccctggacaaagactgacgctcaggtgcgaaagcgtggggagcaaacaggattagataccctggtagtccacgccgtaaacgatgtcgacttggaggttgttcccttgaggagtggcttccggagctaacgcgttaagtcgaccgcctggggagtacggccgcaaggttaaaactcaaatgaattgacgggggcccgcacaagcggtggagcatgtggtttaattcgatgcaacgcgaagaaccttacctactcttgacatccacggaatttagcagagatgctttagtgccttcgggaaccgtgagacaggtgctgcatggctgtcgtcagctcgtgttgtgaaatgttgggttaagtcccgcaacgagcgcaacccttatcctttgttgccagcggtccggccgggaactcaaaggagactgccagtgataaactggaggaaggtggggatgacgtcaagtcatcatggcccttacgagtagggctacacacgtgctacaatggcgcatacaaagagaagcgacctcgcgagagcaagcggacctcataaagtgcgtcgtagtccggatcggagtctgcaactcgactccgtgaagtcggaatcgctagtaatcgtagatcagaatgctacggtgaatacgttcccgggccttgtacacaccgcccgtcacaccatgggagtgggttgcaaaagaagtaggtagcttaaccttcgggagggcgcttaccactttgtgattcatgactggggtgaagtcgtaacaaggtaaccgtaggggaacctgcggttggatcacctcctt

SEQ ID NO: 62 - DNA, 876 bp, Erwinia sp.
  source 1..876: mol_type = genomic DNA; note = DP62; SBI4020
tggctcagattgaacgctggcggcaggcctaacacatgcaagtcgaacggtagcacagaggagcttgctccttgggtgacgagtggcggacgggtgagtaatgtctgggaaactgcccgatggagggggataactactggaaacggtagctaataccgcataacgtcttcggaccaaagtgggggaccttcgggcctcacaccatcggatgtgcccagatgggattagctagtaggtggggtaatggctcacctaggcgacgatccctagctggtctgagaggatgaccagccacactggaactgagacacggtccagactcctacgggaggcagcagtggggaatattgcacaatgggcgcaagcctgatgcagccatgccgcgtgtatgaagaaggccttcgggttgtaaagtactttcagtggggaggaaggcgttaaggttaataaccttggcgattgacgttacccgcagaagaagcaccggctaactccgtgccagcagccgcggtaatacggagggtgcaagcgttaatcggaattactgggcgtaaagcgcacgcaggcggtctgtcaagtcggatgtgaaatccccgggctcaacctgggaactgcattcgaaactggcaggctagagtcttgtagaggggggtagaattccaggtgtagcggtgaaatgcgtagagatctggaggaataccggtggcgaaggcggccccctggacaaagactgacgctcaggtgcgaaagcgtggggagcaaacaggattagataccctggtagtccacgccgtaaacgatgtcgacttggaggttgttcccttgaggagtggcttccggagctaacgcgttaagtcgaccgcctggggagtacgg

SEQ ID NO: 63 - DNA, 1532 bp, Pseudomonas azotoformans
  source 1..1532: mol_type = genomic DNA; note = DP63; SBI4059
tgaagagtttgatcatggctcagattgaacgctggcggcaggcctaacacatgcaagtcgagcggtagagagaagcttgcttctcttgagagcggcggacgggtgagtaatgcctaggaatctgcctggtagtgggggataacgttcggaaacggacgctaataccgcatacgtcctacgggagaaagcaggggaccttcgggccttgcgctatcagatgagcctaggtcggattagctagttggtgaggtaatggctcaccaaggcgacgatccgtaactggtctgagaggatgatcagtcacactggaactgagacacggtccagactcctacgggaggcagcagtggggaatattggacaatgggcgaaagcctgatccagccatgccgcgtgtgtgaagaaggtcttcggattgtaaagcactttaagttgggaggaagggttgtagattaatactctgcaattttgacgttaccgacagaataagcaccggctaactctgtgccagcagccgcggtaatacagagggtgcaagcgttaatcggaattactgggcgtaaagcgcgcgtaggtggtttgttaagttggatgtgaaatccccgggctcaacctgggaactgcattcaaaactgactgactagagtatggtagagggtggtggaatttcctgtgtagcggtgaaatgcgtagatataggaaggaacaccagtggcgaaggcgaccacctggactaatactgacactgaggtgcgaaagcgtggggagcaaacaggattagataccctggtagtccacgccgtaaacgatgtcaactagccgttggaagccttgagcttttagtggcgcagctaacgcattaagttgaccgcctggggagtacggccgcaaggttaaaactcaaatgaattgacgggggcccgcacaagcggtggagcatgtggtttaattcgaagcaacgcgaagaaccttaccaggccttgacatccaatgaactttctagagatagattggtgccttcgggaacattgagacaggtgctgcatggctgtcgtcagctcgtgtcgtgagatgttgggttaagtcccgtaacgagcgcaacccttgttcttagttaccagcacgttatggtgggcactctaaggagactgccggtgacaaaccggaggaaggtggggatgacgtcaagtcatcatggcccttacggcctgggctacacacgtgctacaatggtcggtacagagggttgccaagccgcgaggtggagctaatcccataaaaccgatcgtagtccggatcgcagtctgcaactcgactgcgtgaagtcggaatcgctagtaatcgcgaatcagaatgtcgcggtgaatacgttcccgggccttgtacacaccgcccgtcacaccatgggagtgggttgcaccagaagtagctagtctaaccttcgggaggacggttaccacggtgtgattcatgactggggtgaagtcgtaacaaggtagccgtaggggaacctgcggctggatcacctcctt

SEQ ID NO: 64 - DNA, 1649 bp, Hanseniaspora uvarum
  source 1..1649: mol_type = genomic DNA; note = DP64; SBI108
tccgtaggtgaacctgcggaaggatcattaaataatcaataattttggcttgtccattattatctatttactgtgaactgtattattacttgacgcttgagggatgctccactgctataaggataggcggtggggatgttaaccgagtcatagtcaagcttaggcttggtatcctattattatttaccaaaagaattcagaattaatattgtaacatagacctaaaaaatctataaaacaacttttaacaacggatctcttggttctcgcatcgatgaagaacgtagcaaagtgcgataactagtgtgaattgcatattcagtgaatcatcgagtctttgaacgcaacttgcgctcattggtattccaatgagcacgcctgtttcagtatcaaaacaaaccctctattcaatatttttgttgaataggaatactgagagtctcttgatcttttctgatctcgaacctcttgaaatgtacaaaggcctgatcttgtttgaatgcctgaacttttttttaatataaagagaagctcttgcggtaaactgtgctggggcctcccaaataatactctttttaaatttgatctgaaatcaggcgggattacccgctgaacttaagcatatcaataagcggaggaaaagaaaataacaatgatttccctagtaacggcgagtgaagaggaaagagctcaaagttggaaactgtttggcttagctaaaccgtattgtaaactgtagaaacattttcctggcacgccggattaataagtcctttggaacaaggcatcatggagggtgagaatcccgtctttgatccgagtagttgtcttttgtgatatgttttcaaagagtcaggttgtttgggaatgcagcctaaattgggtggtaaatctcacctaaagctaaatatttgcgagagaccgatagcgaacaagtaccgtgagggaaagatgaaaagaactttgaaaagagagttaaacagtatgtgaaattgttaaaagggaaccgtttggagccagactggtttgactgtaatcaacctagaattcgttctgggtgcacttgcagtctatacctgccaacaacagtttgatttggaggaaaaaattagtaggaatgtagcctctcgaggtgttatagcctactatcatactctggattggactgaggaacgcagcgaatgccattaggcgagattgctgggtgctttcgctaataaatgttagaatttctgcttcgggtggtgctaatgtttaaaggaggaacacatctagtatattttttattcgcttaggttgttggcttaatgactctaaatgacccgtcttgaaacacggaccaaggagtccaccataagtgcaagtatttgagtgacaaactcatatgcgtaaggaaactgattgatacgaaatcttttgatggcagtatcacccggcgttgacgttttatactgaactgaccgaggtaaagcacttatgatgggacccgaaagatggtgaactatgcctgaatagggtgaagccagaggaaactctggtggaggctcgtagcgattctgacgtgcaaatcgatcgtcaaatttgggtataggggcgaaagactaatcgaaccatctagtagctggttcctgccgaagtttccctcagga

SEQ ID NO: 65 - DNA, 1498 bp, Bacillus sp.
  source 1..1498: mol_type = genomic DNA; note = DP65; SBI182
tccgtaggtgaacctgcggaaggatcattattgaaaacaagggtgtccaatttaacttggaacccgaacttctcaattctaactttgtgcatctgtattatggcgagcagtcttcggattgtgagccttcacttataaacactagtctatgaatgtaaaatttttataacaaataaaaactttcaacaacggatctcttggctctcgcatcgatgaagaacgcagcgaaatgcgatacgtaatgtgaattgcagaattcagtgaatcatcgaatctttgaacgcatcttgcgctctctggtattccggagagcatgtctgtttgagtgtcatgaattcttcaacccaatcttttcttgtaatcgattggtgtttggattttgagcgctgctggcttcggcctagctcgttcgtaatacattagcatccctaatacaagtttggattgacttggcgtaatagactattcgctaaggattcggtggaaacatcgagccaacttcattaaggaagctcctaatttaaaagtctaccttttgattagatctcaaatcaggcaggattacccgctgaacttaagcatatcaataagcggaggaaaagaaactaacaaggattcccctagtagcggcgagcgaagcgggaaaagctcaaatttgtaatctggcgtcttcgacgtccgagttgtaatctcgagaagtgttttccgtgatagaccgcatacaagtctcttggaacagagcgtcatagtggtgagaacccagtacacgatgcggatgcctattactttgtgatacactttcgaagagtcgagttgtttgggaatgcagctcaaattgggtggtaaattccatctaaagctaaatattggcgagagaccgatagcgaacaagtaccgtaagggaaagatgaaaagcactttggaaagagagttaacagtacgtgaaattgttggaagggaaacacatgcagtgatacttgctattcggggcaactcgattggcaggcccgcatcagtttttcggggcggaaaagcgtagagagaaggtagcaatttcggttgtgttatagctctttactggattcgccctgggggactgaggaacgcagcgtgcttttagcaattccttcgggaattccacgcttaggatgcgggtttatggctgtatatgacccgtcttgaaacacggaccaaggagtctaacatgcttgcgagtatttgggtgtcaaacccggatgcgcaatgaaagtgaatggaggtgggaagcgcaagctgcaccatcgaccgatctggattttttaagatggatttgagtaagagcaagtatgttgggacccgaaagatggtgaactatgcctgaatagggcgaagccagaggaaactctggtggaggctcgtagcggttctgacgtgcaaatcgatcgtcaaatttgggtataggggcgaaagactaatcgaaccatctagtagctggttcctgccgaagtttccctcagga

SEQ ID NO: 66 - DNA, 1340 bp, Hanseniaspora occidentalis
  source 1..1340: mol_type = genomic DNA; note = DP66; SBI272
tccgtaggtgaacctgcggaaggatcattactgtgatttatccaccacactgcgtgggcgacacgaaacaccgaaaccgaacgcacgccgtcaagcaagaaatccacaaaactttcaacaacggatctcttggttctcgcatcgatgaagagcgcagcgaaatgcgatacctagtgtgaattgcagccatcgtgaatcatcgagttcttgaacgcacattgcgcccgctggtattccggcgggcatgcctgtctgagcgtcgtttccttcttggagcggagcttcagacctggcgggctgtctttcgggacggcgcgcccaaagcgaggggccttctgcgcgaactagactgtgcgcgcggggcggccggcgaacttataccaagctcgacctcagatcaggcaggagtacccgctgaacttaagcatatcaataagcggaggaaaagaaaccaacagggattgccccagtagcggcgagtgaagcggcaaaagctcagatttggaatcgcttcggcgagttgtgaattgcaggttggcgcctctgcggcggcggcggtccaagtcccttggaacagggcgccattgagggtgagagccccgtgggaccgtttgcctatgctctgaggcccttctgacgagtcgagttgtttgggaatgcagctctaagcgggtggtaaattccatctaaggctaaatactggcgagagaccgatagcgaacaagtactgtgaaggaaagatgaaaagcactttgaaaagagagtgaaacagcacgtgaaattgttgaaagggaagggtattgcgcccgacatggagcgtgcgcaccgctgcccctcgtgggcggcgctctgggcgtgctctgggccagcatcggtttttgccgcgggagaagggcggcgggcatgtagctcttcggagtgttatagcctgccgccggcgccgcgagcggggaccgaggactgcgacttttgtctcggatgctggcacaacggcgcaacaccgcccgtcttgaaacatggaccaaggagtctaacgtctatgcgagtgtttgggtgtgaaaccccgggcgcgtaatgaaagtgaacgtaggtcggaccgctcctctcggggggcgggcacgatcgaccgatcctgatgtcttcggatggatttgagtaagagcatagctgttgggacccgaaagatggtgaactatgcctgaatagggtgaagccagaggaaactctggtggaggctcgtagcggttctgacgtgcaaatcgatcgtcgaatttgggtataggggcgaaagactaatcgaaccatctagtagctggttcctgccgaagtttccctcagga

SEQ ID NO: 67 - DNA, 980 bp, Bacillus sp.
  source 1..980: mol_type = genomic DNA; note = DP67; SBI545
tcgagcggacagatgggagcttgctccctgatgttagcggcggacgggtgagtaacacgtgggtaacctgcctgtaagactgggataactccgggaaaccggggctaataccggatgcttgtttgaaccgcatggttcaaacataaaaggtggcttcggctaccacttacagatggacccgcggcgcattagctagttggtgaggtaatggctcaccaaggcaacgatgcgtagccgacctgagagggtgatcggccacactgggactgagacacggcccagactcctacgggaggcagcagtagggaatcttccgcaatggacgaaagtctgacggagcaacgccgcgtgagtgatgaaggttttcggatcgtaaagctctgttgttagggaagaacaagtgccgttcaaatagggcggcaccttgacggtacctaaccagaaagccacggctaactacgtgccagcagccgcggtaatacgtaggtggcaagcgttgtccggaattattgggcgtaaagggctcgcaggcggtttcttaagtctgatgtgaaagcccccggctcaaccggggagggtcattggaaactggggaacttgagtgcagaagaggagagtggaattccacgtgtagcggtgaaatgcgtagagatgtggaggaacaccagtggcgaaggcgactctctggtctgtaactgacgctgaggagcgaaagcgtggggagcgaacaggattagataccctggtagtccacgccgtaaacgatgagtgctaagtgttagggggtttccgccccttagtgctgcagctaacgcattaagcactccgcctggggagtacggtcgcaagactgaaactcaaaggaattgacgggggcccgcacaagcggtggagcatgtggtttaattcgaagcaacgcgaagaaccttaccaggtcttgacatcctctgacaccctagagatagggcttcccttcgggg

SEQ ID NO: 68 - DNA, 680 bp, Bacillus atrophaeus
  source 1..680: mol_type = genomic DNA; note = DP68; SBI550
tgcagtcgagcggacagatgggagcttgctccctgatgttagcggcggacgggtgagtaacacgtgggtaacctgcctgtaagactgggataactccgggaaaccggggctaataccggatgcttgtttgaaccgcatggttcaaacataaaaggtggcttcggctaccacttacagatggacccgcggcgcattagctagttggtgaggtaatggctcaccaaggcaacgatgcgtagccgacctgagagggtgatcggccacactgggactgagacacggcccagactcctacgggaggcagcagtagggaatcttccgcaatggacgaaagtctgacggagcaacgccgcgtgagtgatgaaggttttcggatcgtaaagctctgttgttagggaagaacaagtgccgttcaaatagggcggcaccttgacggtacctaaccagaaagccacggctaactacgtgccagcagccgcggtaatacgtaggtggcaagcgttgtccggaattattgggcgtaaagggctcgcaggcggtttcttaagtctgatgtgaaagcccccggctcaaccggggagggtcattggaaactggggaacttgagtgcagaagaggagagtggaattccacgtgtagcggtgaaatgcgtagagatgtggaggaacaccagtggcgaa

SEQ ID NO: 69 - DNA, 644 bp, Bacillus sp.
  source 1..644: mol_type = genomic DNA; note = DP69; SBI552
tgcagtcgagcggacagatgggagcttgctccctgatgttagcggcggacgggtgagtaacacgtgggtaacctgcctgtaagactgggataactccgggaaaccggggctaataccggatgcttgtttgaaccgcatggttcaaacataaaaggtggcttcggctaccacttacagatggacccgcggcgcattagctagttggtgaggtaatggctcaccaaggcaacgatgcgtagccgacctgagagggtgatcggccacactgggactgagacacggcccagactcctacgggaggcagcagtagggaatcttccgcaatggacgaaagtctgacggagcaacgccgcgtgagtgatgaaggttttcggatcgtaaagctctgttgttagggaagaacaagtgccgttcaaatagggcggcaccttgacggtacctaaccagaaagccacggctaactacgtgccagcagccgcggtaatacgtaggtggcaagcgttgtccggaattattgggcgtaaagggctcgcaggcggtttcttaagtctgatgtgaaagcccccggctcaaccggggagggtcattggaaactggggaacttgagtgcagaagaggagagtggaattccacgtgtagcggtg

SEQ ID NO: 70 - DNA, 787 bp, Bacillus tequilensis
  source 1..787: mol_type = genomic DNA; note = DP70; SBI564
tgcaagtcgagcggacagatgggagcttgctccctgatgttagcggcggacgggtgagtaacacgtgggtaacctgcctgtaagactgggataactccgggaaaccggggctaataccggatggttgtttgaaccgcatggttcaaacataaaaggtggcttcggctaccacttacagatggacccgcggcgcattagctagttggtgaggtaacggctcaccaaggcaacgatgcgtagccgacctgagagggtgatcggccacactgggactgagacacggcccagactcctacgggaggcagcagtagggaatcttccgcaatggacgaaagtctgacggagcaacgccgcgtgagtgatgaaggttttcggatcgtaaagctctgttgttagggaagaacaagtaccgttcgaatagggcggtaccttgacggtacctaaccagaaagccacggctaactacgtgccagcagccgcggtaatacgtaggtggcaagcgttgtccggaattattgggcgtaaagggctcgcaggcggtttcttaagtctgatgtgaaagcccccggctcaaccggggagggtcattggaaactggggaacttgagtgcagaagaggagagtggaattccacgtgtagcggtgaaatgcgtagagatgtggaggaacaccagtggcgaaggcgactctctggtctgtaactgacgctgangagcgaaagcgtggggagcgaacaggattagataccctggtagtccacgccgtaaacgatgagtgctaagtgtta

SEQ ID NO: 71 - DNA, 914 bp, Rhodosporidium babjevae
  source 1..914: mol_type = genomic DNA; note = DP71; SBI1194
ttacttggagtccgaactctcactttttaaccctgtgcatctgttaattggaatagtagctcttcggagtgaaccaccattcacttataaaacacaaagtctatgaatgtatacaaatttataacaaaacaaaactttcaacaacggatctcttggctctcgcatcgatgaagaacgcagcgaaatgcgatacgtaatgtgaattgcagaattcagtgaatcatcgaatctttgaacgcaccttgcgctccttggtattccgaggagcatgcctgtttgagtgtcatgaaatcttcaacccacctctttcttagtgaatctggtggtgcttggtttctgagcgctgctctgcttcggcttagctcgttcgtaatgcattagcatccgcaaccgaacttcggattgacttggcgtaatagactattcgctgaggattctagtttactagagccgagttgggttaaaggaagctcctaatcctaaagtctattttttgattagatctcaaatcaggtaggactacccgctgaacttaagcatatcaataagcggaggaaaagaaactaacaaggattcccctagtagcggcgagcgaagcgggaagagctcaaatttataatctggcaccttcggtgtccgagttgtaatctctagaagtgttttccgcgttggaccgcacacaagtctgttggaatacagcggcatagtggtgaaacccccgtatatggtgcggacgcccagcgctttgtgatacactttcaatgagtcgagttgtttgggaatgcagctcaaattgggtggtaaattccatctaaagctaaatattggcgagagaccgatagcgaacaagtaccgtgagggaaagatgaaaagcactttggaaagagagttaacagtacgtgaaattgttggaa

SEQ ID NO: 72 - DNA, 1547 bp, Bacillus sp.
  source 1..1547: mol_type = genomic DNA; note = DP72; SBI1838
ttcggagagtttgatcctggctcaggacgaacgctggcggcgtgcctaatacatgcaagtcgagcggacagaagggagcttgctcccggatgttagcggcggacgggtgagtaacacgtgggtaacctgcctgtaagactgggataactccgggaaaccggagctaataccggatagttccttgaaccgcatggttcaaggatgaaagacggtttcggctgtcacttacagatggacccgcggcgcattagctagttggtggggtaatggctcaccaaggcgacgatgcgtagccgacctgagagggtgatcggccacactgggactgagacacggcccagactcctacgggaggcagcagtagggaatcttccgcaatggacgaaagtctgacggagcaacgccgcgtgagtgatgaaggttttcggatcgtaaagctctgttgttagggaagaacaagtgcgagagtaactgctcgcaccttgacggtacctaaccagaaagccacggctaactacgtgccagcagccgcggtaatacgtaggtggcaagcgttgtccggaattattgggcgtaaagggctcgcaggcggtttcttaagtctgatgtgaaagcccccggctcaaccggggagggtcattggaaactgggaaacttgagtgcagaagaggagagtggaattccacgtgtagcggtgaaatgcgtagagatgtggaggaacaccagtggcgaaggcgactctctggtctgtaactgacgctgaggagcgaaagcgtggggagcgaacaggattagataccctggtagtccacgccgtaaacgatgagtgctaagtgttagggggtttccgccccttagtgctgcagctaacgcattaagcactccgcctggggagtacggtcgcaagactgaaactcaaaggaattgacgggggcccgcacaagcggtggagcatgtggtttaattcgaagcaacgcgaagaaccttaccaggtcttgacatcctctgacaaccctagagatagggctttcccttcggggacagagtgacaggtggtgcatggttgtcgtcagctcgtgtcgtgagatgttgggttaagtcccgcaacgagcgcaacccttgatcttagttgccagcatttagttgggcactctaaggtgactgccggtgacaaaccggaggaaggtggggatgacgtcaaatcatcatgccccttatgacctgggctacacacgtgctacaatggacagaacaaagggctgcgagaccgcaaggtttagccaatcccataaatctgttctcagttcggatcgcagtctgcaactcgactgcgtgaagctggaatcgctagtaatcgcggatcagcatgccgcggtgaatacgttcccgggccttgtacacaccgcccgtcacaccacgagagtttgcaacacccgaagtcggtgaggtaacctttatggagccagccgccgaaggtggggcagatgattggggtgaagtcgtaacaaggtagccgtatcggaaggtgcggctggatcacctccttt

SEQ ID NO: 73 - DNA, 841 bp, Bacillus amyloliquefaciens
  source 1..841: mol_type = genomic DNA; note = DP73; SBI2802
aacggagagtttgatcctggctcaggacgaacgctggcggcgtgcctaatacatgcaagtcgagcggacagaagggagcttgctcccggacgttagcggcggacgggtgagtaacacgtgggcaacctgccccttagactgggataactccgggaaaccggagctaataccggataatccctttctccacctggagagagggtgaaagatggcttcggctatcactaagggatgggcccgcggcgcattagctagttggtaaggtaacggcttaccaaggcgacgatgcgtagccgacctgagagggtgatcggccacactgggactgagacacggcccagactcctacgggaggcagcagtagggaatcttccgcaatggacgaaagtctgacggagcaacgccgcgtgagtgaggaaggccttcgggtcgtaaagctctgttgtgagggaagaagcggtgccgttcgaatagggcggtaccttgacggtacctcaccagaaagccacggctaactacgtgccagcagccgcggtaatacgtaggtggcaagcgttgtccggaattattgggcgtaaagcgcgcgcaggcggcttcttaagtctgatgtgaaatctcggggctcaaccccgagcggccattggaaactggggagcttgagtgcagaagaggagagtggaattccacgtgtagcggtgaaatgcgtagagatgtggaggaacaccagtggcgaaggcgactctctggtctgtaactgacgctgaggcgcgaaagcgtggggagcaaacaggattagataccctggtagtccacgccgtaaacgatgagtgctaggtgttag

SEQ ID NO: 74 - DNA, 1105 bp, Bacillus coagulans
  source 1..1105: mol_type = genomic DNA; note = DP74; SBI3025
gcctaatacatgcaagtcgtgcggaccttttaaaagcttgcttttaaaaggttagcggcgaacgggtgagtaacacgtgggcaacctgcctgtaagatcgggataatgccgggaaaccggggctaataccggatagttttttcctccgcatggaggaaaaaggaaagacggcttcggctgtcacttacagatgggcccgcggcgcattagcttgttggtggggtaacggctcaccaaggcaacgatgcgtagccgacctgagagggtgatcggccacattgggactgagacacggcccaaactcctacgggaggcagcagtagggaatcttccgcaatggacgaaagtctgacggagcaacgccgcgtgagtgaagaaggccttcgggtcgtaaaactctgttgccggggaagaacaagtgccgttcgaacagggcggcgccttgacggtacccggccagaaagccacggctaactacgtgccagcagccgcggtaatacgtaggtggcaagcgttgtccggaattattgggcgtaaagcgcgcgcaggcggcttcttaagtctgatgtgaaatcttgcggctcaaccgcaagcggtcattggaaactgggaggcttgagtgcagaagaggagagtggaattccacgtgtagcggtgaaatgcgtagagatgtggaggaacaccagtggcgaaggcggctctctggtctgtaactgacgctgaggcgcgaaagcgtggggagcaaacaggattagataccctggtagtccacgccgtaaacgatgagtgctaagtgttagagggtttccgccctttagtgctgcagctaacgcattaagcactccgcctggggagtacggccgcaaggctgaaactcaaaggaattgacgggggcccgcacaagcggtggagcatgtggtttaattcgaagcaacgcgaagaaccttaccaggtcttgacatcctctgacctccctggagacagggccttccccttcgggggacagagtgacaggtggtgcatggttgtcgtcagctcgtgtcgtgagatgttgggttaagtcccgcaacgagcgcaacccttgaccttagttgccagcattcag

SEQ ID NO: 75 - DNA, 1515 bp, Bacillus velezensis
  source 1..1515: mol_type = genomic DNA; note = DP75; SBI3106
tgaagagtttgatcatggctcagattgaacgctggcggcaggcctaacacatgcaagtcgagcggtagagagaagcttgcttctcttgagagcggcggacgggtgagtaatgcctaggaatctgcctggtagtgggggataacgttcggaaacggacgctaataccgcatacgtcctacgggagaaagcaggggaccttcgggccttgcgctatcagatgagcctaggtcggattagctagttggtgaggtaatggctcaccaaggcgacgatccgtaactggtctgagaggatgatcagtcacactggaactgagacacggtccagactcctacgggaggcagcagtggggaatattggacaatgggcgaaagcctgatccagccatgccgcgtgtgtgaagaaggtcttcggattgtaaagcactttaagttgggaggaagggttgtagattaatactctgcaattttgacgttaccgacagaataagcaccggctaactctgtgccagcagccgcggtaatacagagggtgcaagcgttaatcggaattactgggcgtaaagcgcgcgtaggtggttcgttaagttggatgtgaaagccccgggctcaacctgggaactgcattcaaaactgacgagctagagtatggtagagggtggtggaatttcctgtgtagcggtgaaatgcgtagatataggaaggaacaccagtggcgaaggcgaccacctggactgatactgacactgaggtgcgaaagcgtggggagcaaacaggattagataccctggtagtccacgccgtaaacgatgtcaactagccgttggaatccttgagattttagtggcgcagctaacgcattaagttgaccgcctggggagtacggccgcaaggttaaaactcaaatgaattgacgggggcccgcacaagcggtggagcatgtggtttaattcgaagcaacgcgaagaaccttaccaggccttgacatccaatgaactttccagagatggatgggtgccttcgggaacattgagacaggtgctgcatggctgtcgtcagctcgtgtcgtgagatgttgggttaagtcccgtaacgagcgcaacccttgtccttagttaccagcacgttatggtgggcactctaaggagactgccggtgacaaaccggaggaaggtggggatgacgtcaagtcatcatggcccttacggcctgggctacacacgtgctacaatggtcggtacaaagggttgccaagccgcgaggtggagctaatcccataaaaccgatcgtagtccggatcgcagtctgcaactcgactgcgtgaagtcggaatcgctagtaatcgcgaatcagaatgtcgcggtgaatacgttcccgggccttgtacacaccgcccgtcacaccatgggagtgggttgcaccagaacgggaggacggttaccacggtgtgattcatgactggggtgaagtcgtaacaaggtagccgtaggggaacctgcggctggatcacctcctt

SEQ ID NO: 76 - DNA, 1479 bp, Ochrobactrum sp.
  source 1..1479: mol_type = genomic DNA; note = DP76; SBI3482
cttgagagtttgatcctggctcagaacgaacgctggcggcaggcttaacacatgcaagtcgagcgccccgcaaggggagcggcagacgggtgagtaacgcgtgggaatctaccttttgctacggaacaacagttggaaacgactgctaataccgtatgtgcccttcgggggaaagatttatcggcaaaggatgagcccgcgttggattagctagttggtgaggtaaaggctcaccaaggcgacgatccatagctggtctgagaggatgatcagccacactgggactgagacacggcccagactcctacgggaggcagcagtggggaatattggacaatgggcgcaagcctgatccagccatgccgcgtgagtgatgaaggccctagggttgtaaagctctttcaccggtgaagataatgacggtaaccggagaagaagccccggctaacttcgtgccagcagccgcggtaatacgaagggggctagcgttgttcggatttactgggcgtaaagcgcacgtaggcggatttttaagtcaggggtgaaatcccggggctcaaccccggaactgcctttgatactggaagtcttgagtatggtagaggtgagtggaattccgagtgtagaggtgaaattcgtagatattcggaggaacaccagtggcgaaggcggctcactggaccattactgacgctgaggtgcgaaagcgtggggagcaaacaggattagataccctggtagtccacgccgtaaacgatgaatgttagccgtcggggggtttacctttcggtggcgcagctaacgcattaaacattccgcctggggagtacggtcgcaagattaaaactcaaaggaattgacgggggcccgcacaagcggtggagcatgtggtttaattcgaagcaacgcgcagaaccttaccagcccttgacataccggtcgcggacacagagatgtgtctttcagttcggctggaccggatacaggtgctgcatggctgtcgtcagctcgtgtcgtgagatgttgggttaagtcccgcaacgagcgcaaccctcgcctttagttgccagcatttagttgggcactctaaagggactgccagtgataagctggaggaaggtggggatgacgtcaagtcctcatggcccttacgggctgggctacacacgtgctacaatggtggtgacagtgggcagcaagcacgcgagtgtgagctaatctccaaaagccatctcagttcggattgcactctgcaactcgagtgcatgaagttggaatcgctagtaatcgcggatcagcatgccgcggtgaatacgttcccgggccttgtacacaccgcccgtcacaccatgggagttggttttacccgaaggcactgtgctaaccgcaaggaggcaggtgaccacggtagggtcagcgactggggtgaagtcgtaacaaggtagccgtaggggaacctgcggctggatcacctccttt

SEQ ID NO: 77 - DNA, 1549 bp, Bacillus megaterium
  source 1..1549: mol_type = genomic DNA; note = DP77; SBI3608
tcggagagtttgatcctggctcaggatgaacgctggcggcgtgcctaatacatgcaagtcgagcgaactgattagaagcttgcttctatgacgttagcggcggacgggtgagtaacacgtgggcaacctgcctgtaagactgggataacttcgggaaaccgaagctaataccggataggatcttctccttcatgggagatgattgaaagatggtttcggctatcacttacagatgggcccgcggtgcattagctagttggtgaggtaacggctcaccaaggcaacgatgcatagccgacctgagagggtgatcggccacactgggactgagacacggcccagactcctacgggaggcagcagtagggaatcttccgcaatggacgaaagtctgacggagcaacgccgcgtgagtgatgaaggctttcgggtcgtaaaactctgttgttagggaagaacaagtacaagagtaactgcttgtaccttgacggtacctaaccagaaagccacggctaactacgtgccagcagccgcggtaatacgtaggtggcaagcgttatccggaattattgggcgtaaagcgcgcgcaggcggtttcttaagtctgatgtgaaagcccacggctcaaccgtggagggtcattggaaactggggaacttgagtgcagaagagaaaagcggaattccacgtgtagcggtgaaatgcgtagagatgtggaggaacaccagtggcgaaggcggctttttggtctgtaactgacgctgaggcgcgaaagcgtggggagcaaacaggattagataccctggtagtccacgccgtaaacgatgagtgctaagtgttagagggtttccgccctttagtgctgcagctaacgcattaagcactccgcctggggagtacggtcgcaagactgaaactcaaaggaattgacgggggcccgcacaagcggtggagcatgtggtttaattcgaagcaacgcgaagaaccttaccaggtcttgacatcctctgacaactctagagatagagcgttccccttcgggggacagagtgacaggtggtgcatggttgtcgtcagctcgtgtcgtgagatgttgggttaagtcccgcaacgagcgcaacccttgatcttagttgccagcattcagttgggcactctaaggtgactgccggtgacaaaccggaggaaggtggggatgacgtcaaatcatcatgccccttatgacctgggctacacacgtgctacaatggatggtacaaagggctgcaagaccgcgaggtcaagccaatcccataaaaccattctcagttcggattgtaggctgcaactcgcctacatgaagctggaatcgctagtaatcgcggatcagcatgccgcggtgaatacgttcccgggccttgtacacaccgcccgtcacaccacgagagtttgtaacacccgaagtcggtggagtaaccgtaaggagctagccgcctaaggtgggacagatgattggggtgaagtcgtaacaaggtagccgtatcggaaggtgcggctggatcacctccttt

SEQ ID NO: 78 - DNA, 1536 bp, Erwinia rhapontici
  source 1..1536: mol_type = genomic DNA; note = DP78; SBI3625
ttgaagagtttgatcatggctcagattgaacgctggcggcaggcctaacacatgcaagtcggacggtagcacagagagcttgctcttgggtgacgagtggcggacgggtgagtaatgtctggggatctgcccgatagagggggataaccactggaaacggtggctaataccgcataacgtcgcaagaccaaagagggggaccttcgggcctctcactatcggatgaacccagatgggattagctagtaggcggggtaatggcccacctaggcgacgatccctagctggtctgagaggatgaccagccacactggaactgagacacggtccagactcctacgggaggcagcagtggggaatattgcacaatgggcgcaagcctgatgcagccatgccgcgtgtatgaagaaggccttcgggttgtaaagtactttcagcggggaggaaggcgacggggttaataaccctgtcgattgacgttacccgcagaagaagcaccggctaactccgtgccagcagccgcggtaatacggagggtgcaagcgttaatcggaattactgggcgtaaagcgcacgcaggcggtctgttaagtcagatgtgaaatccccgggcttaacctgggaactgcatttgaaactggcaggcttgagtcttgtagaggggggtagaattccaggtgtagcggtgaaatgcgtagagatctggaggaataccggtggcgaaggcggccccctggacaaagactgacgctcaggtgcgaaagcgtggggagcaaacaggattagataccctggtagtccacgccgtaaacgatgtcgacttggaggttgttcccttgaggagtggcttccggagctaacgcgttaagtcgaccgcctggggagtacggccgcaaggttaaaactcaaatgaattgacgggggcccgcacaagcggtggagcatgtggtttaattcgatgcaacgcgaagaaccttacctactcttgacatccagcgaacttagcagagatgctttggtgccttcgggaacgctgagacaggtgctgcatggctgtcgtcagctcgtgttgtgaaatgttgggttaagtcccgcaacgagcgcaacccttatcctttgttgccagcgattcggtcgggaactcaaaggagactgccggtgataaaccggaggaaggtggggatgacgtcaagtcatcatggcccttacgagtagggctacacacgtgctacaatggcgcatacaaagagaagcgacctcgcgagagcaagcggacctcacaaagtgcgtcgtagtccggatcggagtctgcaactcgactccgtgaagtcggaatcgctagtaatcgtggatcagaatgccacggtgaatacgttcccgggccttgtacacaccgcccgtcacaccatgggagtgggttgcaaaagaagtaggtagcttaaccttcgggagggcgcttaccactttgtgattcatgactggggtgaagtcgtaacaaggtaaccgtaggggaacctgcggttggatcacctcctt

SEQ ID NO: 79 - DNA, 1532 bp, Pseudomonas fragi
  source 1..1532: mol_type = genomic DNA; note = DP79; SBI3643
tgaagagtttgatcatggctcagattgaacgctggcggcaggcctaacacatgcaagtcgagcggtagagagaagcttgcttctcttgagagcggcggacgggtgagtaatacctaggaatctgcctgatagtgggggataacgttcggaaacggacgctaataccgcatacgtcctacgggagaaagcaggggaccttcgggccttgcgctatcagatgagcctaggtcggattagctagttggtgaggtaatggctcaccaaggctacgatccgtaactggtctgagaggatgatcagtcacactggaactgagacacggtccagactcctacgggaggcagcagtggggaatattggacaatgggcgaaagcctgatccagccatgccgcgtgtgtgaagaaggtcttcggattgtaaagcactttaagttgggaggaagggcagttacctaatacgtgactgtcttgacgttaccgacagaataagcaccggctaactctgtgccagcagccgcggtaatacagagggtgcaagcgttaatcggaattactgggcgtaaagcgcgcgtaggtggtttgttaagttgaatgtgaaatccccgggctcaacctgggaactgcatccaaaactggcaagctagagtatggtagagggtagtggaatttcctgtgtagcggtgaaatgcgtagatataggaaggaacaccagtggcgaaggcgactacctggactgatactgacactgaggtgcgaaagcgtggggagcaaacaggattagataccctggtagtccacgccgtaaacgatgtcaactagccgttgggagtcttgaactcttagtggcgcagctaacgcattaagttgaccgcctggggagtacggccgcaaggttaaaactcaaatgaattgacgggggcccgcacaagcggtggagcatgtggtttaattcgaagcaacgcgaagaaccttaccaggccttgacatccaatgaactttctagagatagattggtgccttcgggaacattgagacaggtgctgcatggctgtcgtcagctcgtgtcgtgagatgttgggttaagtcccgtaacgagcgcaacccttgtccttagttaccagcacgtaatggtgggcactctaaggagactgccggtgacaaaccggaggaaggtggggatgacgtcaagtcatcatggcccttacggcctgggctacacacgtgctacaatggtcggtacaaagggttgccaagccgcgaggtggagctaatcccataaaaccgatcgtagtccggatcgcagtctgcaactcgactgcgtgaagtcggaatcgctagtaatcgtgaatcagaatgtcacggtgaatacgttcccgggccttgtacacaccgcccgtcacaccatgggagtgggttgcaccagaagtagctagtctaaccttcgggaggacggttaccacggtgtgattcatgactggggtgaagtcgtaacaaggtagccgtaggggaacctgcggctggatcacctcctt

SEQ ID NO: 80 - DNA, 1136 bp, Methylobacterium adhaesivum; identical to SEQ ID NO: 54
  source 1..1136: mol_type = genomic DNA; note = DP80; SBI3659

SEQ ID NO: 81 - DNA, 1547 bp, Bacillus sp.
  source 1..1547: mol_type = genomic DNA; note = DP81; SBI3805
aacggagagtttgatcctggctcaggacgaacgctggcggcgtgcctaatacatgcaagtcgagcggacagaagggagcttgctcccggacgttagcggcggacgggtgagtaacacgtgggcaacctgccccttagactgggataactccgggaaaccggagctaataccggataatccctttctccacctggagagagggtgaaagatggcttcggctatcactaggggatgggcccgcggcgcattagctagttggtaaggtaacggcttaccaaggcgacgatgcgtagccgacctgagagggtgatcggccacactgggactgagacacggcccagactcctacgggaggcagcagtagggaatcttccgcaatggacgaaagtctgacggagcaacgccgcgtgagtgaggaaggctttcgggtcgtaaagctctgttgtgagggaagaagcggtaccgttcgaatagggcggtaccttgacggtacctcaccagaaagccacggctaactacgtgccagcagccgcggtaatacgtaggtggcaagcgttgtccggaattattgggcgtaaagcgcgcgcaggcggcttcttaagtctgatgtgaaatctcggggctcaaccccgagcggccattggaaactggggagcttgagtgcagaagaggagagtggaattccacgtgtagcggtgaaatgcgtagagatgtggaggaacaccagtggcgaaggcgactctctggtctgtaactgacgctgaggcgcgaaagcgtggggagcaaacaggattagataccctggtagtccacgccgtaaacgatgagtgctaggtgttaggggtttcgatgcccgtagtgccgaagttaacacattaagcactccgcctggggagtacggccgcaaggctgaaactcaaaggaattgacggggacccgcacaagcagtggagcatgtggtttaattcgaagcaacgcgaagaaccttaccaggtcttgacatcctttgaccacccaagagattgggcttccccttcgggggcaaagtgacaggtggtgcatggttgtcgtcagctcgtgtcgtgagatgttgggttaagtcccgcaacgagcgcaacccttgatcttagttgccagcattgagttgggcactctaaggtgactgccggtgacaaaccggaggaaggtggggatgacgtcaaatcatcatgccccttatgacctgggctacacacgtgctacaatggatggtacaaagggcagcgaaaccgcgaggtgaagccaatcccataaagccattctcagttcggattgcaggctgcaactcgcctgcatgaagccggaattgctagtaatcgcggatcagcatgccgcggtgaatacgttcccgggtcttgtacacaccgcccgtcacaccacgagagtttgtaacacccgaagtcggtgaggcaaccttttggagccagccgcctaaggtgggacaaatgattggggtgaagtcgtaacaaggtagccgtatcggaaggtgcggctggatcacctccttt

SEQ ID NO: 82 - DNA, 1547 bp, Bacillus velezensis
  source 1..1547: mol_type = genomic DNA; note = DP82; SBI3882
aacggagagtttgatcctggctcaggacgaacgctggcggcgtgcctaatacatgcaagtcgagcggacagaagggagcttgctcccggacgttagcggcggacgggtgagtaacacgtgggcaacctgccccttagactgggataactccgggaaaccggagctaataccggataatccctttctccacctggagagagggtgaaagatggcttcggctatcactaagggatgggcccgcggcgcattagctagttggtaaggtaacggcttaccaaggcaacgatgcgtagccgacctgagagggtgatcggccacactgggactgagacacggcccagactcctacgggaggcagcagtagggaatcttccgcaatggacgaaagtctgacggagcaacgccgcgtgagtgaggaaggccttcgggtcgtaaagctctgttgtgagggaagaagcggtaccgttcgaatagggcggtaccttgacggtacctcaccagaaagccacggctaactacgtgccagcagccgcggtaatacgtaggtggcaagcgttgtccggaattattgggcgtaaagcgcgcgcaggcggcttcttaagtctgatgtgaaatctcggggctcaaccccgagcggccattggaaactggggagcttgagtgcagaagaggagagtggaattccacgtgtagcggtgaaatgcgtagagatgtggaggaacaccagtggcgaaggcgactctctggtctgtaactgacgctgaggcgcgaaagcgtggggagcaaacaggattagataccctggtagtccacgccgtaaacgatgagtgctaggtgttaggggtttcgatgcccgtagtgccgaagttaacacattaagcactccgcctggggagtacggccgcaaggctgaaactcaaaggaattgacggggacccgcacaagcagtggagcatgtggtttaattcgaagcaacgcgaagaaccttaccaggtcttgacatcctttgaccacccaagagattgggcttccccttcgggggcaaagtgacaggtggtgcatggttgtcgtcagctcgtgtcgtgagatgttgggttaagtcccgcaacgagcgcaacccttgatcttagttgccagcattcagttgggcactctaaggtgactgccggtgacaaaccggaggaaggtggggatgacgtcaaatcatcatgccccttatgacctgggctacacacgtgctacaatggatggtacaaagggcagcgaaaccgcgaggtgaagccaatcccataaagccattctcagttcggattgcaggctgcaactcgcctgcatgaagccggaattgctagtaatcgcggatcagcatgccgcggtgaatacgttcccgggtcttgtacacaccgcccgtcacaccacgagagtttgtaacacccgaagtcggtgaggcaaccttttggagccagccgcctaaggtgggacaaatgattggggtgaagtcgtaacaaggtagccgtatcggaaggtgcggctggatcacctccttt

SEQ ID NO: 83 - DNA, 1548 bp, Bacillus amyloliquefaciens
  source 1..1548: mol_type = genomic DNA; note = DP83; SBI3886
acggagagtttgatcctggctcaggacgaacgctggcggcgtgcctaatacatgcaagtcgagcggagtttcaagaagcttgctttttgaaacttagcggcggacgggtgagtaacacgtgggcaacctgccccttagactgggataactccgggaaaccggagctaataccggataatccctttctccacctggagagagggtgaaagatggcttcggctatcactaagggatgggcccgcggcgcattagctagttggtaaggtaacggcttaccaaggcaacgatgcgtagccgacctgagagggtgatcggccacactgggactgagacacggcccagactcctacgggaggcagcagtagggaatcttccgcaatggacgaaagtctgacggagcaacgccgcgtgagtgaggaaggccttcgggtcgtaaagctctgttgtgagggaagaagcggtaccgttcgaatagggcggtaccttgacggtacctcaccagaaagccacggctaactacgtgccagcagccgcggtaatacgtaggtggcaagcgttgtccggaattattgggcgtaaagcgcgcgcaggcggcttcttaagtctgatgtgaaatctcggggctcaaccccgagcggccattggaaactggggagcttgagtgcagaagaggagagtggaattccacgtgtagcggtgaaatgcgtagagatgtggaggaacaccagtggcgaaggcgactctctggtctgtaactgacgctgaggcgcgaaagcgtggggagcaaacaggattagataccctggtagtccacgccgtaaacgatgagtgctaggtgttaggggtttcgatgcccgtagtgccgaagttaacacattaagcactccgcctggggagtacggccgcaaggctgaaactcaaaggaattgacggggacccgcacaagcagtggagcatgtggtttaattcgaagcaacgcgaagaaccttaccaggtcttgacatcctttgaccacccaagagattgggcttccccttcgggggcaaagtgacaggtggtgcatggttgtcgtcagctcgtgtcgtgagatgttgggttaagtcccgcaacgagcgcaacccttgatcttagttgccagcattcagttgggcactctaaggtgactgccggtgacaaaccggaggaaggtggggatgacgtcaaatcatcatgccccttatgacctgggctacacacgtgctacaatggatggtacaaagggcagcgaagccgcgaggtgaagccaatcccataaagccattctcagttcggattgcaggctgcaactcgcctgcatgaagccggaattgctagtaatcgcggatcagcatgccgcggtgaatacgttcccgggtcttgtacacaccgcccgtcacaccacgagagtttgtaacacccgaagtcggtgaggcaaccttttggagccagccgcctaaggtgggacaaatgattggggtgaagtcgtaacaaggtagccgtatcggaaggtgcggctggatcacctccttt

SEQ ID NO: 84 - DNA, 1480 bp, Microbacterium sp.
  source 1..1480: mol_type = genomic DNA; note = DP84; SBI3916
tacggagagtttgatcctggctcaggatgaacgctggcggcgtgcttaacacatgcaagtcgaacggtgaagccaagcttgcttggtggatcagtggcgaacgggtgagtaacacgtgagcaacctgccctggactctgggataagcgctggaaacggcgtctaatactggatatgagctctcatcgcatggtgggggttggaaagattttttggtctgggatgggctcgcggcctatcagcttgttggtgaggtaatggctcaccaaggcgtcgacgggtagccggcctgagagggtgaccggccacactgggactgagacacggcccagactcctacgggaggcagcagtggggaatattgcacaatgggcgaaagcctgatgcagcaacgccgcgtgagggatgacggccttcgggttgtaaacctcttttagcagggaagaagcgaaagtgacggtacctgcagaaaaagcgccggctaactacgtgccagcagccgcggtaatacgtagggcgcaagcgttatccggaattattgggcgtaaagagctcgtaggcggtttgtcgcgtctgctgtgaaatcccgaggctcaacctcgggcctgcagtgggtacgggcagactagagtgcggtaggggagattggaattcctggtgtagcggtggaatgcgcagatatcaggaggaacaccgatggcgaaggcagatctctgggccgtaactgacgctgaggagcgaaagggtggggagcaaacaggcttagataccctggtagtccaccccgtaaacgttgggaactagttgtggggaccattccacggtttccgtgacgcagctaacgcattaagttccccgcctggggagtacggccgcaaggctaaaactcaaaggaattgacggggacccgcacaagcggcggagcatgcggattaattcgatgcaacgcgaagaaccttaccaaggcttgacatacaccagaacgggccagaaatggtcaactctttggacactggtgaacaggtggtgcatggttgtcgtcagctcgtgtcgtgagatgttgggttaagtcccgcaacgagcgcaaccctcgttctatgttgccagcacgtaatggtgggaactcatgggatactgccggggtcaactcggaggaaggtggggatgacgtcaaatcatcatgccccttatgtcttgggcttcacgcatgctacaatggccggtacaaagggctgcaataccgtgaggtggagcgaatcccaaaaagccggtcccagttcggattgaggtctgcaactcgacctcatgaagtcggagtcgctagtaatcgcagatcagcaacgctgcggtgaatacgttcccgggtcttgtacacaccgcccgtcaagtcatgaaaggagccgtcgaaggtgggatcggtaattaggactaagtcgtaacaaggtagccgtaccggaaggtgcggctggatcacctccttt

SEQ ID NO: 85 - DNA, 924 bp, Enterococcus faecium
  source 1..924: mol_type = genomic DNA; note = DP85; SBI4245
acggtcgggggcatcagtattcagtcgtcagaggtgaaattcttggattgactgaagactaactactgcgaaagcatttgccaaggacgttttcattaatcaagaacgaaagttaggggatcgaagatgatcagataccgtcgtagtcttaaccataaactatgccgactagagatcgggtggtgctttttgcgcactcggcatcttacgagaaatcaaagtctttgggttctggggggagtatggtcgcaaggctgaaacttaaaggaattgacggaggggcaccaccaggagtggagcctgcggcttaatttgactcaacacggggaaactcaccaggtccagacgtaataaggattgacaagttagagacttctcttgatcttacgggtggtggtgcatggccgtttttagtccttggagtgatttgtctgcttaattgcgataacggacgagaccttaacctgctaaatagggctgcgagcatctgctcgtgggctcttcttagagggactatgggtatcaaacccatggaagtttgaggcaacaacaggtctgtgatgcccttagacgttctgggccgcacgcgcgctacactgacggagccagcaagcataaccttggtcgagaggcctgggtaatctcgtgaaactccgtcgtgctggggatagagcattgtaatttttgctcttcaacgaggaattcctagtaagcgcaagtcatcagcttgcgttgattacgtccctgccccttgtacacaccgcccgtcgctactaccgattgaatggcttagtgaggcttcaagaccggcgcggcctgcggggcaactcgcgcgctgcgctgggaatttagtcaaacttggtcatttagaggtcgtaaaagtcgtaacaaggtttccgtaggtgaacctgcggaaggatcatt

SEQ ID NO: 86 - DNA, 881 bp, Bacillus velezensis
  source 1..881: mol_type = genomic DNA; note = DP86; SBI4246
cgatgcgtagccgacctgagagggtgatcggccacactgggactgagacacggcccagactcctacgggaggcagcagtagggaatcttccgcaatggacgaaagtctgacggagcaacgccgcgtgagtgatgaaggttttcggatcgtaaagctctgttgttagggaagaacaagtgccgttcaaatagggcggcaccttgacggtacctaaccagaaagccacggctaactacgtgccagcagccgcggtaatacgtaggtggcaagcgttgtccggaattattgggcgtaaagggctcgcaggcggtttcttaagtctgatgtgaaagcccccggctcaaccggggagggtcattggaaactggggaacttgagtgcagaagaggagagtggaattccacgtgtagcggtgaaatgcgtagagatgtggaggaacaccagtggcgaaggcgactctctggtctgtaactgacgctgaggagcgaaagcgtggggagcgaacaggattagataccctggtagtccacgccgtaaacgatgagtgctaagtgttagggggtttccgccccttagtgctgcagctaacgcattaagcactccgcctggggagtacggtcgcaagactgaaactcaaaggaattgacgggggcccgcacaagcggtggagcatgtggtttaattcgaagcaacgcgaagaaccttaccaggtcttgacatcctctgacaatcctagagataggacgtccccttcgggggcagagtgacaggtggtgcatggttgtcgtcagctcgtgtcgtgagatgttgggttaagtcccgcaacgagcgcaacccttgatcttagttgccagcattcagttgggtgttctttgaaaact

SEQ ID NO: 87 - DNA, 1563 bp, Lactobacillus plantarum
  source 1..1563: mol_type = genomic DNA; note = DP87; SBI4247
tttgagagtttgatcctggctcaggacgaacgctggcggcgtgcctaatacatgcaagtcgaacgaactctggtattgattggtgcttgcatcatgatttacatttgagtgagtggcgaactggtgagtaacacgtgggaaacctgcccagaagcgggggataacacctggaaacagatgctaataccgcataacaacttggaccgcatggtccgagcttgaaagatggcttcggctatcacttttggatggtcccgcggcgtattagctagatggtggggtaacggctcaccatggcaatgatacgtagccgacctgagagggtaatcggccacattgggactgagacacggcccaaactcctacgggaggcagcagtagggaatcttccacaatggacgaaagtctgatggagcaacgccgcgtgagtgaagaagggtttcggctcgtaaaactctgttgttaaagaagaacatatctgagagtaactgttcaggtattgacggtatttaaccagaaagccacggctaactacgtgccagcagccgcggtaatacgtaggtggcaagcgttgtccggatttattgggcgtaaagcgagcgcaggcggttttttaagtctgatgtgaaagccttcggctcaaccgaagaagtgcatcggaaactgggaaacttgagtgcagaagaggacagtggaactccatgtgtagcggtgaaatgcgtagatatatggaagaacaccagtggcgaaggcggctgtctggtctgtaactgacgctgaggctcgaaagtatgggtagcaaacaggattagataccctggtagtccataccgtaaacgatgaatgctaagtgttggagggtttccgcccttcagtgctgcagctaacgcattaagcattccgcctggggagtacggccgcaaggctgaaactcaaaggaattgacgggggcccgcacaagcggtggagcatgtggtttaattcgaagctacgcgaagaaccttaccaggtcttgacatactatgcaaatctaagagattagacgttcccttcggggacatggatacaggtggtgcatggttgtcgtcagctcgtgtcgtgagatgttgggttaagtcccgcaacgagcgcaacccttattatcagttgccagcattaagttgggcactctggtgagactgccggtgacaaaccggaggaaggtggggatgacgtcaaatcatcatgccccttatgacctgggctacacacgtgctacaatggatggtacaacgagttgcgaactcgcgagagtaagctaatctcttaaagccattctcagttcggattgtaggctgcaactcgcctacatgaagtcggaatcgctagtaatcgcggatcagcatgccgcggtgaatacgttcccgggccttgtacacaccgcccgtcacaccatgagagtttgtaacacccaaagtcggtggggtaaccttttaggaaccagccgcctaaggtgggacagatgattagggtgaagtcgtaacaaggtagccgtaggagaacctgcggctggatcacctcctt

SEQ ID NO: 88 - DNA, 1546 bp, Bacillus velezensis
  source 1..1546: mol_type = genomic DNA; note = DP88; SBI4248
tagtgggtttgatcctggctcaggacgaacgctggcggcgtgcctaatacatgcaagtcgagcggacagatgggagcttgctccctgatgttagcggcggacgggtgagtaacacgtgggtaacctgcctgtaagactgggataactccgggaaaccggggctaataccggatggttgtctgaaccgcatggttcagacataaaaggtggcttcggctaccacttacagatggacccgcggcgcattagctagttggtgaggtaacggctcaccaaggcgacgatgcgtagccgacctgagagggtgatcggccacactgggactgagacacggcccagactcctacgggaggcagcagtagggaatcttccgcaatggacgaaagtctgacggagcaacgccgcgtgagtgatgaaggttttcggatcgtaaagctctgttgttagggaagaacaagtgccgttcaaatagggcggcaccttgacggtacctaaccagaaagccacggctaactacgtgccagcagccgcggtaatacgtaggtggcaagcgttgtccggaattattgggcgtaaagggctcgcaggcggtttcttaagtctgatgtgaaagcccccggctcaaccggggagggtcattggaaactggggaacttgagtgcagaagaggagagtggaattccacgtgtagcggtgaaatgcgtagagatgtggaggaacaccagtggcgaaggcgactctctggtctgtaactgacgctgaggagcgaaagcgtggggagcgaacaggattagataccctggtagtccacgccgtaaacgatgagtgctaagtgttagggggtttccgccccttagtgctgcagctaacgcattaagcactccgcctggggagtacggtcgcaagactgaaactcaaaggaattgacgggggcccgcacaagcggtggagcatgtggtttaattcgaagcaacgcgaagaaccttaccaggtcttgacatcctctgacaatcctagagataggacgtccccttcgggggcagagtgacaggtggtgcatggttgtcgtcagctcgtgtcgtgagatgttgggttaagtcccgcaacgagcgcaacccttgatcttagttgccagcattcagttgggcactctaaggtgactgccggtgacaaaccggaggaaggtggggatgacgtcaaatcatcatgccccttatgacctgggctacacacgtgctacaatggacagaacaaagggcagcgaaaccgcgaggttaagccaatcccacaaatctgttctcagttcggatcgcagtctgcaactcgactgcgtgaagctggaatcgctagtaatcgcggatcagcatgccgcggtgaatacgttcccgggccttgtacacaccgcccgtcacaccacgagagtttgtaacacccgaagtcggtgaggtaacctttatggagccagccgccgaaggtgggacagatgattggggtgaagtcgtaacaaggtagccgtatcggaaggtgcggctggatcacctccttt

SEQ ID NO: 89 - DNA, 1285 bp, Bacillus subtilis
  source 1..1285: mol_type = genomic DNA; note = DP89; SBI4249
gtaacggctcaccaaggcaacgatgcgtagccgacctgagagggtgatcggccacactgggactgagacacggcccagactcctacgggaggcagcagtagggaatcttccgcaatggacgaaagtctgacggagcaacgccgcgtgagtgatgaaggttttcggatcgtaaagctctgttgttagggaagaacaagtaccgttcgaatagggcggtaccttgacggtacctaaccagaaagccacggctaactacgtgccagcagccgcggtaatacgtaggtggcaagcgttgtccggaattattgggcgtaaagggctcgcaggcggtttcttaagtctgatgtgaaagcccccggctcaaccggggagggtcattggaaactggggaacttgagtgcagaagaggagagtggaattccacgtgtagcggtgaaatgcgtagagatgtggaggaacaccagtggcgaaggcgactctctggtctgtaactgacgctgaggagcgaaagcgtggggagcgaacaggattagataccctggtagtccacgccgtaaacgatgagtgctaagtgttagggggtttccgccccttagtgctgcagctaacgcattaagcactccgcctggggagtacggtcgcaagactgaaactcaaaggaattgacgggggcccgcacaagcggtggagcatgtggtttaattcgaagcaacgcgaagaaccttaccaggtcttgacatcctctgacaatcctagagataggacgtccccttcgggggcagagtgacaggtggtgcatggttgtcgtcagctcgtgtcgtgagatgttgggttaagtcccgcaacgagcgcaacccttgatcttagttgccagcattcagttgggcactctaaggtgactgccggtgacaaaccggaggaaggtggggatgacgtcaaatcatcatgccccttatgacctgggctacacacgtgctacaatggacagaacaaagggcagcgaaaccgcgaggttaagccaatcccacaaatctgttctcagttcggatcgcagtctgcaactcgactgcgtgaagctggaatcgctagtaatcgcggatcagcatgccgcggtgaatacgttcccgggccttgtacacaccgcccgtcacaccacgagagtttgtaacacccgaagtcggtgaggtaaccttttaggagccagccgccgaaggtgggacagatgattggggtgaagtcgtaacaaggtagccgtatcggaaggtgcggctggatcacctccttt

SEQ ID NO: 90 - DNA, 1563 bp, Lactobacillus plantarum; identical to SEQ ID NO: 87
  source 1..1563: mol_type = genomic DNA; note = DP90; SBI4250

SEQ ID NO: 91 - skipped

SEQ ID NO: 92 - DNA, 1265 bp, Bacillus tequilensis
  source 1..1265: mol_type = genomic DNA; note = DP92; SBI4252
cgatgcgtagccgacctgagagggtgatcggccacactgggactgagacacggcccagactcctacgggaggcagcagtagggaatcttccgcaatggacgaaagtctgacggagcaacgccgcgtgagtgatgaaggttttcggatcgtaaagctctgttgttagggaagaacaagtaccgttcgaatagggcggtaccttgacggtacctaaccagaaagccacggctaactacgtgccagcagccgcggtaatacgtaggtggcaagcgttgtccggaattattgggcgtaaagggctcgcaggcggtttcttaagtctgatgtgaaagcccccggctcaaccggggagggtcattggaaactggggaacttgagtgcagaagaggagagtggaattccacgtgtagcggtgaaatgcgtagagatgtggaggaacaccagtggcgaaggcgactctctggtctgtaactgacgctgaggagcgaaagcgtggggagcgaacaggattagataccctggtagtccacgccgtaaacgatgagtgctaagtgttagggggtttccgccccttagtgctgcagctaacgcattaagcactccgcctggggagtacggtcgcaagactgaaactcaaaggaattgacgggggcccgcacaagcggtggagcatgtggtttaattcgaagcaacgcgaagaaccttaccaggtcttgacatcctctgacaatcctagagataggacgtccccttcgggggcagagtgacaggtggtgcatggttgtcgtcagctcgtgtcgtgagatgttgggttaagtcccgcaacgagcgcaacccttgatcttagttgccagcattcagttgggcactctaaggtgactgccggtgacaaaccggaggaaggtggggatgacgtcaaatcatcatgccccttatgacctgggctacacacgtgctacaatggacagaacaaagggcagcgaaaccgcgaggttaagccaatcccacaaatctgttctcagttcggatcgcagtctgcaactcgactgcgtgaagctggaatcgctagtaatcgcggatcagcatgccgcggtgaatacgttcccgggccttgtacacaccgcccgtcacaccacgagagtttgtaacacccgaagtcggtgaggtaaccttttaggagccagccgccgaaggtgggacagatgattggggtgaagtcgtaacaaggtagccgtatcggaaggtgcggctggatcacctccttt

SEQ ID NO: 93 - DNA, 1548 bp, Leuconostoc mesenteroides
  source 1..1548: mol_type = genomic DNA; note = DP93; SBI4255
attgagagtttgatcctggctcaggatgaacgctggcggcgtgcctaatacatgcaagtcgaacgcacagcgaaaggtgcttgcacctttcaagtgagtggcgaacgggtgagtaacacgtggacaacctgcctcaaggctggggataacatttggaaacagatgctaataccgaataaaacttagtgtcgcatgacaaaaagttaaaaggcgcttcggcgtcacctagagatggatccgcggtgcattagttagttggtggggtaaaggcctaccaagacaatgatgcatagccgagttgagagactgatcggccacattgggactgagacacggcccaaactcctacgggaggctgcagtagggaatcttccacaatgggcgaaagcctgatggagcaacgccgcgtgtgtgatgaaggctttcgggtcgtaaagcactgttgtatgggaagaacagctagaataggaaatgattttagtttgacggtaccataccagaaagggacggctaaatacgtgccagcagccgcggtaatacgtatgtcccgagcgttatccggatttattgggcgtaaagcgagcgcagacggtttattaagtctgatgtgaaagcccggagctcaactccggaatggcattggaaactggttaacttgagtgcagtagaggtaagtggaactccatgtgtagcggtggaatgcgtagatatatggaagaacaccagtggcgaaggcggcttactggactgcaactgacgttgaggctcgaaagtgtgggtagcaaacaggattagataccctggtagtccacaccgtaaacgatgaacactaggtgttaggaggtttccgcctcttagtgccgaagctaacgcattaagtgttccgcctggggagtacgaccgcaaggttgaaactcaaaggaattgacggggacccgcacaagcggtggagcatgtggtttaattcgaagcaacgcgaagaaccttaccaggtcttgacatcctttgaagcttttagagatagaagtgttctcttcggagacaaagtgacaggtggtgcatggtcgtcgtcagctcgtgtcgtgagatgttgggttaagtcccgcaacgagcgcaacccttattgttagttgccagcattcagatgggcactctagcgagactgccggtgacaaaccggaggaaggcggggacgacgtcagatcatcatgccccttatgacctgggctacacacgtgctacaatggcgtatacaacgagttgccaacccgcgagggtgagctaatctcttaaagtacgtctcagttcggattgtagtctgcaactcgactacatgaagtcggaatcgctagtaatcgcggatcagcacgccgcggtgaatacgttcccgggtcttgtacacaccgcccgtcacaccatgggagtttgtaatgcccaaagccggtggcctaaccttttaggaaggagccgtctaaggcaggacagatgactggggtgaagtcgtaacaaggtagccgtaggagaacctgcggctggatcacctccttt

SEQ ID NO: 94 - DNA, 1421 bp, Lactobacillus brevis
  source 1..1421: mol_type = genomic DNA; note = DP94; SBI4254
atctgcccagaagcaggggataacacttggaaacaggtgctaataccgtataacaacaaaatccgcatggattttgtttgaaaggtggcttcggctatcacttctggatgatcccgcggcgtattagttagttggtgaggtaaaggcccaccaagacgatgatacgtagccgacctgagagggtaatcggccacattgggactgagacacggcccaaactcctacgggaggcagcagtagggaatcttccacaatggacgaaagtctgatggagcaatgccgcgtgagtgaagaagggtttcggctcgtaaaactctgttgttaaagaagaacacctttgagagtaactgttcaagggttgacggtatttaaccagaaagccacggctaactacgtgccagcagccgcggtaatacgtaggtggcaagcgttgtccggatttattgggcgtaaagcgagcgcaggcggttttttaagtctgatgtgaaagccttcggcttaaccggagaagtgcatcggaaactgggagacttgagtgcagaagaggacagtggaactccatgtgtagcggtggaatgcgtagatatatggaagaacaccagtggcgaaggcggctgtctagtctgtaactgacgctgaggctcgaaagcatgggtagcgaacaggattagataccctggtagtccatgccgtaaacgatgagtgctaagtgttggagggtttccgcccttcagtgctgcagctaacgcattaagcactccgcctggggagtacgaccgcaaggttgaaactcaaaggaattgacgggggcccgcacaagcggtggagcatgtggtttaattcgaagctacgcgaagaaccttaccaggtcttgacatcttctgccaatcttagagataagacgttcccttcggggacagaatgacaggtggtgcatggttgtcgtcagctcgtgtcgtgagatgttgggttaagtcccgcaacgagcgcaacccttattatcagttgccagcattcagttgggcactctggtgagactgccggtgacaaaccggaggaaggtggggatgacgtcaaatcatcatgccccttatgacctgggctacacacgtgctacaatggacggtacaacgagttgcgaagtcgtgaggctaagctaatctcttaaagccgttctcagttcggattgtaggctgcaactcgcctacatgaagttggaatcgctagtaatcgcggatcagcatgccgcggtgaatacgttcccgggccttgtacacaccgcccgtcacaccatgagagtttgtaacacccaaagccggtgagataaccttcgggagtcagccgtctaaggtgggacagatgattagggtgaagtcgtaacaaggtagccgtaggagaacctgcggctggatcacctcctt

SEQ ID NO: 95 - DNA, 1388 bp, Lactobacillus paracasei
  source 1..1388: mol_type = genomic DNA; note = DP95; SBI4253
tgctaataccgcatagatccaagaaccgcatggttcttggctgaaagatggcgtaagctatcgcttttggatggacccgcggcgtattagctagttggtgaggtaatggctcaccaaggcgatgatacgtagccgaactgagaggttgatcggccacattgggactgagacacggcccaaactcctacgggaggcagcagtagggaatcttccacaatggacgcaagtctgatggagcaacgccgcgtgagtgaagaaggctttcgggtcgtaaaactctgttgttggagaagaatggtcggcagagtaactgttgtcggcgtgacggtatccaaccagaaagccacggctaactacgtgccagcagccgcggtaatacgtaggtggcaagcgttatccggatttattgggcgtaaagcgagcgcaggcggttttttaagtctgatgtgaaagccctcggcttaaccgaggaagcgcatcggaaactgggaaacttgagtgcagaagaggacagtggaactccatgtgtagcggtgaaatgcgtagatatatggaagaacaccagtggcgaaggcggctgtctggtctgtaactgacgctgaggctcgaaagcatgggtagcgaacaggattagataccctggtagtccatgccgtaaacgatgaatgctaggtgttggagggtttccgcccttcagtgccgcagctaacgcattaagcattccgcctggggagtacgaccgcaaggttgaaactcaaaggaattgacgggggcccgcacaagcggtggagcatgtggtttaattcgaagcaacgcgaagaaccttaccaggtcttgacatcttttgatcacctgagagatcaggtttccccttcgggggcaaaatgacaggtggtgcatggttgtcgtcagctcgtgtcgtgagatgttgggttaagtcccgcaacgagcgcaacccttatgactagttgccagcatttagttgggcactctagtaagactgccggtgacaaaccggaggaaggtggggatgacgtcaaatcatcatgccccttatgacctgggctacacacgtgctacaatggatggtacaacgagttgcgagaccgcgaggtcaagctaatctcttaaagccattctcagttcggactgtaggctgcaactcgcctacacgaagtcggaatcgctagtaatcgcggatcagcacgccgcggtgaatacgttcccgggccttgtacacaccgcccgtcacaccatgagagtttgtaacacccgaagccggtggcgtaacccttttagggagcgagccgtctaaggtgggacaaatgattagggtgaagtcgtaacaaggtagccgtaggagaacctgcggctggatcacctccttt

SEQ ID NO: 96 - DNA, 1219 bp, Lactobacillus casei
  source 1..1219: mol_type = genomic DNA; note = DP96; SBI4256
acacggcccaaactcctacgggaggcagcagtagggaatcttccacaatggacgcaagtctgatggagcaacgccgcgtgagtgaagaaggctttcgggtcgtaaaactctgttgttggagaagaatggtcggcagagtaactgttgtcggcgtgacggtatccaaccagaaagccacggctaactacgtgccagcagccgcggtaatacgtaggtggcaagcgttatccggatttattgggcgtaaagcgagcgcaggcggttttttaagtctgatgtgaaagccctcggcttaaccgaggaagcgcatcggaaactgggaaacttgagtgcagaagaggacagtggaactccatgtgtagcggtgaaatgcgtagatatatggaagaacaccagtggcgaaggcggctgtctggtctgtaactgacgctgaggctcgaaagcatgggtagcgaacaggattagataccctggtagtccatgccgtaaacgatgaatgctaggtgttggagggtttccgcccttcagtgccgcagctaacgcattaagcattccgcctggggagtacgaccgcaaggttgaaactcaaaggaattgacgggggcccgcacaagcggtggagcatgtggtttaattcgaagcaacgcgaagaaccttaccaggtcttgacatcttttgatcacctgagagatcaggtttccccttcgggggcaaaatgacaggtggtgcatggttgtcgtcagctcgtgtcgtgagatgttgggttaagtcccgcaacgagcgcaacccttatgactagttgccagcatttagttgggcactctagtaagactgccggtgacaaaccggaggaaggtggggatgacgtcaaatcatcatgccccttatgacctgggctacacacgtgctacaatggatggtacaacgagttgcgagaccgcgaggtcaagctaatctcttaaagccattctcagttcggactgtaggctgcaactcgcctacacgaagtcggaatcgctagtaatcgcggatcagcacgccgcggtgaatacgttcccgggccttgtacacaccgcccgtcacaccatgagagtttgtaacacccgaagccggtggcgtaacccttttagggagcgagccgtctaaggtgggacaaatgattagggtgaagtcgtaacaaggtagccgtaggagaacctgcggctggatcacctccttt

SEQ ID NO: 97 - DNA, 1546 bp, Lactococcus garvieae
  source 1..1546: mol_type = genomic DNA; note = DP97; SBI4257
aatgagagtttgatcctggctcaggacgaacgctggcggcgtgcctaatacatgcaagtcgagcgatgattaaagatagcttgctatttttatgaagagcggcgaacgggtgagtaacgcgtgggaaatctgccgagtagcgggggacaacgtttggaaacgaacgctaataccgcataacaatgagaatcgcatgattcttatttaaaagaagcaattgcttcactacttgatgatcccgcgttgtattagctagttggtagtgtaaaggactaccaaggcgatgatacatagccgacctgagagggtgatcggccacactgggactgagacacggcccagactcctacgggaggcagcagtagggaatcttcggcaatgggggcaaccctgaccgagcaacgccgcgtgagtgaagaaggttttcggatcgtaaaactctgttgttagagaagaacgttaagtagagtggaaaattacttaagtgacggtatctaaccagaaagggacggctaactacgtgccagcagccgcggtaatacgtaggtcccaagcgttgtccggatttattgggcgtaaagcgagcgcaggtggtttcttaagtctgatgtaaaaggcagtggctcaaccattgtgtgcattggaaactgggagacttgagtgcaggagaggagagtggaattccatgtgtagcggtgaaatgcgtagatatatggaggaacaccggaggcgaaagcggctctctggcctgtaactgacactgaggctcgaaagcgtggggagcaaacaggattagataccctggtagtccacgccgtaaacgatgagtgctagctgtagggagctataagttctctgtagcgcagctaacgcattaagcactccgcctggggagtacgaccgcaaggttgaaactcaaaggaattgacgggggcccgcacaagcggtggagcatgtggtttaattcgaagcaacgcgaagaaccttaccaggtcttgacatactcgtgatatccttagagataaggagttccttcgggacacgggatacaggtggtgcatggttgtcgtcagctcgtgtcgtgagatgttgggttaagtcccgcaacgagcgcaacccttattactagttgccatcattaagttgggcactctagtgagactgccggtgataaaccggaggaaggtggggatgacgtcaaatcatcatgccccttatgacctgggctacacacgtgctacaatggatggtacaacgagtcgccaacccgcgagggtgcgctaatctcttaaaaccattctcagttcggattgcaggctgcaactcgcctgcatgaagtcggaatcgctagtaatcgcggatcagcacgccgcggtgaatacgttcccgggccttgtacacaccgcccgtcacaccacggaagttgggagtacccaaagtaggttgcctaaccgcaaggagggcgcttcctaaggtaagaccgatgactggggtgaagtcgtaacaaggtagccgtatcggaaggtgcggctggatcacctccttt

SEQ ID NO: 98 - DNA, 1546 bp, Lactococcus garvieae; identical to SEQ ID NO: 97
  source 1..1546: mol_type = genomic DNA; note = DP98; SBI4258

SEQ ID NO: 99 - DNA, 619 bp, Weissella cibaria
  source 1..619: mol_type = genomic DNA; note = DP99; SBI4259
gatttgaagagcttgctcagatatgacgatggacattgcaaagagtggcgaacgggtgagtaacacgtgggaaacctacctcttagcaggggataacatttggaaacagatgctaataccgtataacaatagcaaccgcatggttgctacttaaaagatggttctgctatcactaagagatggtcccgcggtgcattagttagttggtgaggtaatggctcaccaagacgatgatgcatagccgagttgagagactgatcggccacaatgggactgagacacggcccatactcctacgggaggcagcagtagggaatcttccacaatgggcgaaagcctgatggagcaacgccgcgtgtgtgatgaagggtttcggctcgtaaaacactgttgtaagagaagaatgacattgagagtaactgttcaatgtgtgacggtatcttaccagaaaggaacggctaaatacgtgccagcagccgcggtaatacgtatgttccaagcgttatccggatttattgggcgtaaagcgagcgcagacggttatttaagtctgaagtgaaagccctcagctcaactgaggaattgctttggaaactggatgacttgagtgcagtagagg

SEQ ID NO: 100 - DNA, 1263 bp, Lactobacillus plantarum
  source 1..1263: mol_type = genomic DNA; note = DP100; SBI3108
tttgagagtttgatcctggctcaggacgaacgctggcggcgtgcctaatacatgcaagtcgaacgaactctggtattgattggtgcttgcatcatgatttacatttgagtgagtggcgaactggtgagtaacacgtgggaaacctgcccagaagcgggggataacacctggaaacagatgctaataccgcataacaacttggaccgcatggtccgagcttgaaagatggcttcggctatcacttttggatggtcccgcggcgtattagctagatggtggggtaacggctcaccatggcaatgatacgtagccgacctgagagggtaatcggccacattgggactgagacacggcccaaactcctacgggaggcagcagtagggaatcttccacaatggacgaaagtctgatggagcaacgccgcgtgagtgaagaagggtttcggctcgtaaaactctgttgttaaagaagaacatatctgagagtaactgttcaggtattgacggtatttaaccagaaagccacggctaactacgtgccagcagccgcggtaatacgtaggtggcaagcgttgtccggatttattgggcgtaaagcgagcgcaggcggttttttaagtctgatgtgaaagccttcggctcaaccgaagaagtgcatcggaaactgggaaacttgagtgcagaagaggacagtggaactccatgtgtagcggtgaaatgcgtagatatatggaagaacaccagtggcgaaggcggctgtctggtctgtaactgacgctgaggctcgaaagtatgggtagcaaacaggattagataccctggtagtccataccgtaaacgatgaatgctaagtgttggagggtttccgcccttcagtgctgcagctaacgcattaagcattccgcctggggagtacggccgcaaggctgaaactcaaaggaattgacgggggcccgcacaagcggtggagcatgtggtttaattcgaagctacgcgaagaaccttaccaggtcttgacatactatgcaaatctaagagattagacgttcccttcggggacatggatacaggtggtgcatggttgtcgtcagctcgtgtcgtgagatgttgggttaagtcccgcaacgagcgcaacccttattatcagttgccagcattaagttgggcactctggtgagactgccggtgacaaaccggaggaaggtggggatgacgtcaaatcatcatgccccttatgacctgggctacacacgtgctacaatgg

SEQ ID NO: 101 - DNA, 1457 bp, Pediococcus pentosaceus
  source 1..1457: mol_type = genomic DNA; note = DP101; SBI3220
atgagagtttgatcttggctcaggatgaacgctggcggcgtgcctaatacatgcaagtcgaacgaacttccgttaattgattatgacgtacttgtactgattgagattttaacacgaagtgagtggcgaacgggtgagtaacacgtgggtaacctgcccagaagtaggggataacacctggaaacagatgctaataccgtataacagagaaaaccgcatggttttcttttaaaagatggctctgctatcacttctggatggacccgcggcgtattagctagttggtgaggcaaaggctcaccaaggcagtgatacgtagccgacctgagagggtaatcggccacattgggactgagacacggcccagactcctacgggaggcagcagtagggaatcttccacaatggacgcaagtctgatggagcaacgccgcgtgagtgaagaagggtttcggctcgtaaagctctgttgttaaagaagaacgtgggtaagagtaactgtttacccagtgacggtatttaaccagaaagccacggctaactacgtgccagcagccgcggtaatacgtaggtggcaagcgttatccggatttattgggcgtaaagcgagcgcaggcggtcttttaagtctaatgtgaaagccttcggctcaaccgaagaagtgcattggaaactgggagacttgagtgcagaagaggacagtggaactccatgtgtagcggtgaaatgcgtagatatatggaagaacaccagtggcgaaggcggctgtctggtctgcaactgacgctgaggctcgaaagcatgggtagcgaacaggattagataccctggtagtccatgccgtaaacgatgattactaagtgttggagggtttccgcccttcagtgctgcagctaacgcattaagtaatccgcctggggagtacgaccgcaaggttgaaactcaaaagaattgacgggggcccgcacaagcggtggagcatgtggtttaattcgaagctacgcgaagaaccttaccaggtcttgacatcttctgacagtctaagagattagaggttcccttcggggacagaatgacaggtggtgcatggttgtcgtcagctcgtgtcgtgagatgttgggttaagtcccgcaacgagcgcaacccttattactagttgccagcattaagttgggcactctagtgagactgccggtgacaaaccggaggaaggtggggacgacgtcaaatcatcatgccccttatgacctgggctacacacgtgctacaatggatggtacaacgagtcgcgagaccgcgaggttaagctaatctcttaaaaccattctcagttcggactgtaggctgcaactcgcctacacgaagtcggaatcgctagtaatcgcggatcagcatgccgcggtgaatacgttcccgggccttgtacacaccgcccgtcacaccatgagagtttgtaac

SEQ ID NO: 102 - DNA, 1415 bp, Pichia kudriavzevii
  source 1..1415: mol_type = genomic DNA; note = DP102; SBI3298
tccgtaggtgaacctgcggaaggatcattactgtgatttagtactacactgcgtgagcggaacgaaaacaacaacacctaaaatgtggaatatagcatatagtcgacaagagaaatctacgaaaaacaaacaaaactttcaacaacggatctcttggttctcgcatcgatgaagagcgcagcgaaatgcgatacctagtgtgaattgcagccatcgtgaatcatcgagttcttgaacgcacattgcgcccctcggcattccggggggcatgcctgtttgagcgtcgtttccatcttgcgcgtgcgcagagttgggggagcggagcggacgacgtgtaaagagcgtcggagctgcgactcgcctgaaagggagcgaagctggccgagcgaactagactttttttcagggacgcttggcggccgagagcgagtgttgcgagacaacaaaaagctcgacctcaaatcaggtaggaatacccgctgaacttaagcatatcaataagcggaggaaaagaaaccaacagggattgcctcagtagcggcgagtgaagcggcaagagctcagatttgaaatcgtgctttgcggcacgagttgtagattgcaggttggagtctgtgtggaaggcggtgtccaagtcccttggaacagggcgcccaggagggtgagagccccgtgggatgccggcggaagcagtgaggcccttctgacgagtcgagttgtttgggaatgcagctccaagcgggtggtaaattccatctaaggctaaatactggcgagagaccgatagcgaacaagtactgtgaaggaaagatgaaaagcactttgaaaagagagtgaaacagcacgtgaaattgttgaaagggaagggtattgcgcccgacatggggattgcgcaccgctgcctctcgtgggcggcgctctgggctttccctgggccagcatcggttcttgctgcaggagaaggggttctggaacgtggctcttcggagtgttatagccagggccagatgctgcgtgcggggaccgaggactgcggccgtgtaggtcacggatgctggcagaacggcgcaacaccgcccgtcttgaaacatggaccaaggagtctaacgtctatgcgagtgtttgggtgtgaaacccgtacgcgtaatgaaagtgaacgtaggtcggaccccctgccctcggggaggggagcacgatcgaccgatcccgatgtttatcggaaggatttgagtaggagcatagctgttgggacccgaaagatggtgaactatgcctgaatagggtgaagccagaggaaactctggtggaggctcgtagcggttctgacgtgcaaatcgatcgtcgaatttgggtataggggcgaaagactaatcgaaccatctagtagctggttcctgccgaagtttccctcagga

SEQ ID NO: 103 - DNA, 1458 bp, Bacillus subtilis
  source 1..1458: mol_type = genomic DNA; note = CS00001_16S rRNA
gggcagggcggcagctatacatgcaagtcgagcggacagatgggagcttgctccctgatgttagcggcggacgggtgagtaacacgtgggtaacctgcctgtaagactgggataactccgggaaaccggggctaataccggatggttgtttgaaccgcatggttcaaacataaaaggtggcttcggctaccacttacagatggacccgcggcgcattagctagttggtgaggtaacggctcaccaaggcaacgatgcgtagccgacctgagagggtgatcggccacactgggactgagacacggcccagactcctacgggaggcagcagtagggaatcttccgcaatggacgaaagtctgacggagcaacgccgcgtgagtgatgaaggttttcggatcgtaaagctctgttgttagggaagaacaagtaccgttcgaatagggcggtaccttgacggtacctaaccagaaagccacggctaactacgtgccagcagccgcggtaatacgtaggtggcaagcgttgtccggaattattgggcgtaaagggctcgcaggcggtttcttaagtctgatgtgaaagcccccggctcaaccggggagggtcattggaaactggggaacttgagtgcagaagaggagagtggaattccacgtgtagcggtgaaatgcgtagagatgtggaggaacaccagtggcgaaggcgactctctggtctgtaactgacgctgaggagcgaaagcgtggggagcgaacaggattagataccctggtagtccacgccgtaaacgatgagtgctaagtgttagggggtttccgccccttagtgctgcagctaacgcattaagcactccgcctggggagtacggtcgcaagactgaaactcaaaggaattgacgggggcccgcacaagcggtggagcatgtggtttaattcgaagcaacgcgaagaaccttaccaggtcttgacatcctctgacaatcctagagataggacgtccccttcgggggcagagtgacaggtggtgcatggttgtcgtcagctcgtgtcgtgagatgttgggttaagtcccgcaacgagcgcaacccttgatcttagttgccagcattcagttgggcactctaaggtgactgccggtgacaaaccggaggaaggtggggatgacgtcaaatcatcatgccccttatgacctgggctacacacgtgctacaatggacagaacaaagggcagcgaaaccgcgaggttaagccaatcccacaaatctgttctcagttcggatcgcagtctgcaactcgactgcgtgaagctggaatcgctagtaatcgcggatcagcatgccgcggtgaatacgttcccgggccttgtacacaccgcccgtcacaccacgagagtttgtaacacccgaagtcggtgaggtaaccttttaggagccagccgccgaagtgaaaagaaagggg

SEQ ID NO: 104 - DNA, 515 bp, Lactiplantibacillus plantarum
  source 1..515: mol_type = genomic DNA; note = CS00007_16S rRNA
gctcaggacgaacgctggcggcgtgcctaatacatgcaagtcgaacgaactctggtattgattggtgcttgcatcatgatttacatttgagtgagtggcgaactggtgagtaacacgtgggaaacctgcccagaagcgggggataacacctggaaacagatgctaataccgcataacaacttggaccgcatggtccgagnttgaaagatggcttcggctatcacttttggatggtcccgcggcgtattagctagatggtggggtaacggctcaccatggcaatgatacgtagccgacctgagagggtaatcggccacattgggactgagacacggcccaaactcctacgggaggcagcagtagggaatcttccacaatggacgaaagtctgatggagcaacgccgcgtgagtgaagaagggtttcggctcgtaaaactctgttgttaaagaagaacatatctgagagtaactgttcaggtattgacggtatttaaccagaaagccacggctaact

SEQ ID NO: 105 - DNA, 1512 bp, Lactobacillus acidophilus
  source 1..1512: mol_type = genomic DNA; note = CS00008_16S rRNA
aacgctggcggcgtgcctaatacatgcaagtcgagcgagctgaaccaacagattcacttcggtgatgacgttgggaacgcgagcggcggatgggtgagtaacacgtggggaacctgccccatagtctgggataccacttggaaacaggtgctaataccggataagaaagcagatcgcatgatcagcttataaaaggcggcgtaagctgtcgctatgggatggccccgcggtgcattagctagttggtagggtaacggcctaccaaggcaatgatgcatagccgagttgagagactgatcggccacattgggactgagacacggcccaaactcctacgggaggcagcagtagggaatcttccacaatggacgaaagtctgatggagcaacgccgcgtgagtgaagaaggttttcggatcgtaaagctctgttgttggtgaagaaggatagaggtagtaactggcctttatttgacggtaatcaaccagaaagtcacggctaactacgtgccagcagccgcggtaatacgtaggtggcaagcgttgtccggatttattgggcgtaaagcgagcgcaggcggaagaataagtctgatgtgaaagccctcggcttaaccgaggaactgcatcggaaactgtttttcttgagtgcagaagaggagagtggaactccatgtgtagcggtggaatgcgtagatatatggaagaacaccagtggcgaaggcggctctctggtctgcaactgacgctgaggctcgaaagcatgggtagcgaacaggattagataccctggtagtccatgccgtaaacgatgagtgctaagtgttgggaggtttccgcctctcagtgctgcagctaacgcattaagcactccgcctggggagtacgaccgcaaggttgaaactcaaaggaattgacgggggcccgcacaagcggtggagcatgtggtttaattcgaagcaacgcgaagaaccttaccaggtcttgacatctagtgcaatccgtagagatacggagttcccttcggggacactaagacaggtggtgcatggctgtcgtcagctcgtgtcgtgagatgttgggttaagtcccgcaacgagcgcaacccttgtcattagttgccagcattaagttgggcactctaatgagactgccggtgacaaaccggaggaaggtggggatgacgtcaagtcatcatgccccttatgacctgggctacacacgtgctacaatggacagtacaacgaggagcaagcctgcgaaggcaagcgaatctcttaaagctgttctcagttcggactgcagtctgcaactcgactgcacgaagctggaatcgctagtaatcgcggatcagcacgccgcggtgaatacgttcccgggccttgtacacaccgcccgtcacaccatgggagtctgcaatgcccaaagccggtggcctaaccttcgggaaggagccgtctaaggcagggcagatgactggggtgaagtcgtaacaaggtagccgtaggagaacc

SEQ ID NO: 106 - DNA, 931 bp, Lactobacillus paracasei
  source 1..931: mol_type = genomic DNA; note = CS00017_16S rRNA
cgagttctcgttgatgatcggtgcttgcaccgagattcaacatggaacgagtggcggacgggtgagtaacacgtgggtaacctgcccttaagtgggggataacatttggaaacagatgctaataccgcatagatccaagaaccgcatggttcttggctgaaagatggcgtaagctatcgcttttggatggacccgcggcgtattagctagttggtgaggtaatggctcaccaaggcgatgatacgtagccgaactgagaggttgatcggccacattgggactgagacacggcccaaactcctacgggaggcagcagtagggaatcttccacaatggacgcaagtctgatggagcaacgccgcgtgagtgaagaaggctttcgggtcgtaaaactctgttgttggagaagaatggtcggcagagtaactgttgtcggcgtgacggtatccaaccagaaagccacggctaactacgtgccagcagccgcggtaatacgtaggtggcaagcgttatccggatttattgggcgtaaagcgagcgcangcggttttttaagtctgatgtgaaagccctcggcttaaccgaggaagcgcatcggaaactgggaaacttgagtgcagaagaggacagtggaactccatgtgtagcggtgaaatgcgtagatatatggaagaacaccagtggcgaangcggctgtctggtctgtaactgacgctgangctcgaaagcatgggtagcgaacangattagataccctggtagtccatgccgtaaacgatgaatgctnntgttgganggtttccgcccttcagtgccgcagctaacgcattaagcattccgcctggggagtacgaccgcaaggttgaaactcaaaggaattgacgggggcccgcacaagcggtggancatgtggtttaattcgaagcaacgc

SEQ ID NO: 107 - DNA, 855 bp, unidentified
  source 1..855: mol_type = genomic DNA; note = Saccharomyces boulardii; CS00018_ITS sequence
cctttcctttgggggggggggggtcgaaggatcattaaagaaatttataattttgaaaatggatttttttgttttggcaagagcatgagagcttttactgggcaagaagacaagagatggagagtccagccgggcctgcgcttaagtgcgcggtcttgctaggcttgtaagtttctttcttgctattccaaacggtgagagatttctgtgcttttgttataggacaattaaaaccgtttcaatacaacacactgtggagttttcatatctttgcaactttttctttgggcattcgagcaatcggggcccagaggtaacaaacacaaacaattttatctattcattaaatttttgtcaaaaacaagaattttcgtaactggaaattttaaaatattaaaaactttcaacaacggatctcttggttctcgcatcgatgaagaacgcagcgaaatgcgatacgtaatgtgaattgcagaattccgtgaatcatcgaatctttgaacgcacattgcgccccttggtattccagggggcatgcctgtttgagcgtcatttccttctcaaacattctgtttggtagtgagtgatactctttggagttaacttgaaattgctggccttttcattggatgttttttttccaaagagaggtttctctgcgtgcttgaggtataatgcaagtacggtcgttttaggttttaccaactgcggctaatctttttttatactgagcgtattggaacgttatcgataagaagagagcgtctaggcgaacaatgttcttaaagtttgacctcaaatcaggtaggagtacccgctgaacttaagcatactaaacgggggaagaaaaaaggt

SEQ ID NO: 108 - DNA, 938 bp, Holtermanniella takashimae
  source 1..938: mol_type = genomic DNA; note = SBI00120_ITS sequence
ccgctctgatctatacacacctgtgaactgttggccttcgggtctttaattacaactgtgacgaacgtaaattattataacaaataaaacttttaacaacggatctcttggctctcgcatcgatgaagaacgcagcgaaatgcgataagtaatgtgaattgcagaattcagtgaatcatcgaatctttgaacgcaccttgcgcccgttggtattccgacgggcatgcctgtttgagtgtcgtgaacaacctcaaccttgattggttttaccatcaaggcttggacttgggtgttgctgctgcaaagtggctcgccttaaaactattagctggacttgtctatgacttggttcgactcgatgtaataagtattcatcggggacagggttaaacctggccaaggcttgatgccgtctgcttctaatcatgttctcactatgagacgctactttactgtgtggcctcaaatcaggtaggattacccgctgaacttaagcatatcaataagcggaggaaaagaaactaacaaggattcccctagtaacggcgagtgaagcgggatgagctcaaatttgtaatctggtggactcagttcatccgaattgtaatctatagaaaagttttccgcgctggaccgtgtctaagtcccttggaacagggtgtcagagagggtgagaatcccgtgcttgatacgaccaccagtgctatgtgatactttttcaacgagtcgagttgtttgggaatgcagctcaaaatgggtggtaaattccatctaaagctaaatattggcgagagaccgatagcgaacaagtaccgtgagggaaagatgaaaagcactttggaaagagagttaaacagtacgtgaaattgttaaaagggaaacgattgaagtcagtcgtgctctctaggactcagccagttcttctggtgtatttccta

SEQ ID NO: 109 - DNA, 833 bp, Clavispora sp.
  source 1..833: mol_type = genomic DNA; note = SBI00264_ITS sequence
aaatcaattttttttcttcaatacaacaaaaaaatcaaaactttcaacaacggatctcttggttctcgcatcgatgaagaacgcagcgaattgcgatacgtagtatgacttgcagacgtgaatcatcgaatctttgaacgcacattgcgcctcgaggtattcctcgaggcatgcctgtttgagcgtcggccccccctctaacccccgggttaggtgttgacacgaaattccaagcgcaatcaatctcatgtttttgatgacgcccacccatttcgccctcaaatcaggtaggactacccgctgaacttaagcatatcaataagcggaggaaaagaaaccaacagggattgcctcagtaacggcgagtgaagcggcaaaagctcaaatttgaaatcccgcgggagttgtaatttgaaggtttcgggttctgaggctgtgcgcgcccaagtccattggaacatggcgcctgggagggtgagagccccgtccggcgctgcgcagtctttttttgcgacccgtttccgacgagtcgagttgtttgggaatgcagctcaaagtgggtggtaaattccatctaaagctaaatattggcgagagaccgatagcgaacaagtacagtgatggaaagatgaaaagcactttgaaaagagagtgaaacagtacgtgaaattgttgaaagggaagggcttgcaagcagacacggtttcggccgggccagcatcggtttgccggggcggacaatgcggcgggaatgtggcgcgtctccttgtggggcgcgtgtttatagcccggcgtgatacgcccatggtagaccgaggcctgcgatctaatct

SEQ ID NO: 110 - DNA, 976 bp, Exiguobacterium sp.
  source 1..976: mol_type = genomic DNA; note = SBI00449_16S rRNA
tgcagtcgagcgcaggaaactgacggaactcttcggagggaaggcagcggaatgagcggcggacgggtgagtaacacgtaaggaacctgcctcaaggattgggataactccgagaaatcggagctaataccggatagttcaacggaccgcatggtccgctgatgaaaggcgctccggcgtcaccttgagatggccttgcggtgcattagctagttggtgaggtaacggcccaccaaggcgacgatgcatagccgacctgagagggtgatcggccacactgggactgagacacggcccagactcctacgggaggcagcagtagggaatcttccacaatggacgaaagtctgatggagcaacgccgcgtgagtgatgaaggttttcggatcgtaaaactctgttgtaagggaagaacacgtacgagaggtaatgctcgtaccttgacggtaccttacgagaaagccacggctaactacgtgccagcagccgcggtaatacgtaggtggcaagcgttgtccggaattattgggcgtaaagcgcgcgcaggcggccttttaagtctgatgtgaaagcccccggctcaaccggggagggccattggaaactggaaggcttgagtacagaagagaagagtggaattccacgtgtagcggtgaaatgcgtagagatgtggaggaacaccagtggcgaaggcgactctttggtctgtaactgacgctgaggcgcgaaagcgtggggagcaaacaggattagataccctggtagtccacgccgtaaacgatgagtgctangtgttggggggtttccgcccctcagtgctgaagctaacgcattaagcactccgcctggggagtacggccgcaaggctgaaactcaaaggaattgacggggacccgcacaagcggtggagcatgtggtttaattcgaagcaacgcgaagaaccttaccaactcttgacatcccattgaccgcttga

SEQ ID NO: 111 - DNA, 1533 bp, Bacillus safensis
  source 1..1533: mol_type = genomic DNA; note = SBI00461_16S rRNA
ggagagtttgatcctggctcaggacgaacgctggcggcgtgcctaatacatgcaagtcgagcggacagaagggagcttgctcccggatgttagcggcggacgggtgagtaacacgtgggtaacctgcctgtaagactgggataactccgggaaaccggagctaataccggatagttccttgaaccgcatggttcaaggatgaaagacggtttcggctgtcacttacagatggacccgcggcgcattagctagttggtggggtaatggctcaccaaggcgacgatgcgtagccgacctgagagggtgatcggccacactgggactgagacacggcccagactcctacgggaggcagcagtagggaatcttccgcaatggacgaaagtctgacggagcaacgccgcgtgagtgatgaaggttttcggatcgtaaagctctgttgttagggaagaacaagtgcgagagtaactgctcgcaccttgacggtacctaaccagaaagccacggctaactacgtgccagcagccgcggtaatacgtaggtggcaagcgttgtccggaattattgggcgtaaagggctcgcaggcggtttcttaagtctgatgtgaaagcccccggctcaaccggggagggtcattggaaactgggaaacttgagtgcagaagaggagagtggaattccacgtgtagcggtgaaatgcgtagagatgtggaggaacaccagtggcgaaggcgactctctggtctgtaactgacgctgaggagcgaaagcgtggggagcgaacaggattagataccctggtagtccacgccgtaaacgatgagtgctaagtgttagggggtttccgccccttagtgctgcagctaacgcattaagcactccgcctggggagtacggtcgcaagactgaaactcaaaggaattgacgggggcccgcacaagcggtggagcatgtggtttaattcgaagcaacgcgaagaaccttaccaggtcttgacatcctctgacaaccctagagatagggctttcccttcggggacagagtgacaggtggtgcatggttgtcgtcagctcgtgtcgtgagatgttgggttaagtcccgcaacgagcgcaacccttgatcttagttgccagcattcagttgggcactctaaggtgactgccggtgacaaaccggaggaaggtggggatgacgtcaaatcatcatgccccttatgacctgggctacacacgtgctacaatggacagaacaaagggctgcaagaccgcaaggtttagccaatcccataaatctgttctcagttcggatcgcagtctgcaactcgactgcgtgaagctggaatcgctagtaatcgcggatcagcatgccgcggtgaatacgttcccgggccttgtacacaccgcccgtcacaccacgagagtttgcaacacccgaagtcggtgaggtaacctttatggagccagccgccgaaggtggggcagatgattggggtgaagtcgtaacaaggtagccgtatcggaaggtgcggctgtg

SEQ ID NO: 112 - DNA, 858 bp, Bacillus subtilis
  source 1..858: mol_type = genomic DNA; note = SBI00553_16S rRNA
tgcagtcgagcggacagatgggagcttgctccctgatgttagcggcggacgggtgagtaacacgtgggtaacctgcctgtaagactgggataactccgggaaaccggggctaataccggatgcttgtttgaaccgcatggttcaaacataaaaggtggcttcggctaccacttacagatggacccgcggcgcattagctagttggtgaggtaatggctcaccaaggcaacgatgcgtagccgacctgagagggtgatcggccacactgggactgagacacggcccagactcctacgggaggcagcagtagggaatcttccgcaatggacgaaagtctgacggagcaacgccgcgtgagtgatgaaggttttcggatcgtaaagctctgttgttagggaagaacaagtaccgttcgaatagggcggtaccttgacggtacctaaccagaaagccacggctaactacgtgccagcagccgcggtaatacgtaggtggcaagcgttgtccggaattattgggcgtaaagggctcgcaggcggtttcttaagtctgatgtgaaagcccccggctcaaccggggagggtcattggaaactggggaacttgagtgcagaagaggagagtggaattccacgtgtagcggtgaaatgcgtagagatgtggaggaacaccagtggcgaaggcgactctctggtctgtaactgacgctgaggagcgaaagcgtggggagcgaacaggattagataccctggtagtccacgccgtaaacgatgagtgctaagtgttaggggtttccgccccttagtgctgcagctaacgcattaagcactccgcctggggagtacggtcgcaagactga

SEQ ID NO: 113 - DNA, 657 bp, Paenibacillus sp.
  source 1..657: mol_type = genomic DNA; note = SBI00556_16S rRNA
tgcagtcgagcggacttgatggagtgcttgcactcctgatggttagcggcggacgggtgagtaacacgtaggtaacctgcccataagactgggataacccacggaaacgtgagctaataccagataggcattttcctcgcatgagggagatgagaaaggcggagcaatctgccacttatggatggacctgcggcgcattagctagttggtaaggtaacggcttaccaaggcgacgatgcgtagccgacctgagagggtgatcggccacactgggactgagacacggcccagactcctacgggaggcagcagtagggaatcttccgcaatggacgaaagtctgacggagcaacgccgcgtgagtgatgaaggttttcggatcgtaaagctctgttgccagggaagaacgcctaggagagtaactgctcttagggtgacggtacctgagaagaaagccccggctaactacgtgccagcagccgcggtaatacgtagggggcgagcgttgtccggaattattgggcgtaaagcgcgcgcaggcggcaatgtaagttgggtgtttaaacctagggctcaaccttgggtcgcatccaaaactgcatagcttgagtacagaagaggaaagtggaattccacgtgtagcggtgaaatgcgtaga

SEQ ID NO: 114 - DNA, 619 bp, Psychrobacillus sp.
  source 1..619: mol_type = genomic DNA; note = SBI00568_16S rRNA
acatgcagtcgagcgaatgacgaagaagctgtgcttcttctgatttagcggcggacgggtgagtaacacgtgggcaacctgccctgtagattgggataactccgggaaaccggggctaataccgaataatccatttcctcacatgtggaaatgttaaaagacggtttacgctgtcactacaggatgggcccgcggcgcattagctagttggtgaggtaacggctcaccaaggcgacgatgcgtagccgacctgagagggtgatcggccacactgggactgagacacggcccagactcctacgggaggcagcagtagggaatcttccacaatggacgaaagtctgatggagcaatgccgcgtgagtgaagaaggttttcggatcgtaaaactctgttgtgagggaagaacaagtacgagagtaactgctcgtaccttgacggtacctcattagaaagccacggctaactacgtgccagcagccgcggtaatacgtaggtggcaagcgttgtccggaattattgggcgtaaagcgcgcgcaggcggtcctttaagtctgatgtgaaatcccacggctcaaccgtggaaggtcattggaaactgggggacttgagtacagaa

SEQ ID NO: 115 - DNA, 1483 bp, Bacillus axarquiensis
  source 1..1483: mol_type = genomic DNA; note = SBI00589_16S rRNA
tcggagagtttgatcctggctcaggacgaacgctggcggcgtgcctaatacatgcaagtcgagcggacagatgggagtttgctccctgatgttagcggcggacgggtgagtaacacgtgggtaacctgcctgtaagactgggataactccgggaaaccggggctaataccggatgctgcgcattagctagttggtgaggtaatggctcaccaaggcaacgatgcgtagccgacctgagagggtgatcggccacactgggactgagacacggcccagactcctacgggaggcagcagtagggaatcttccgcaatggacgaaagtctgacggagcaacgccgcgtgagtgatgaaggttttcggatcgtaaagctctgttgttagggaagaacaagtaccgttcgaatagggcggtaccttgacggtacctaaccagaaagccacggctaactacgtgccagcagccgcggtaatacgtaggtggcaagcgttgtccggaattattgggcgtaaagggctcgcaggcggttccttaagtctgatgtgaaagcccccggctcaaccggggagggtcattggaaactggggaacttgagtgcagaagaggagagtggaattccacgtgtagcggtgaaatgcgtagagatgtggaggaacaccagtggcgaaggcgactctctggtctgtaactgacgctgaggagcgaaagcgtggggagcgaacaggattagataccctggtagtccacgccgtaaacgatgagtgctaagtgttagggggtttccgccccttagtgctgcagctaacgcattaagcactccgcctggggagtacggtcgcaagactgaaactcaaaggaattgacgggggcccgcacaagcggtggagcatgtggtttaattcgaagcaacgcgaagaaccttaccaggtcttgacatcctctgacaatcctagagataggacgtccccttcgggggcagagtgacaggtggtgcatggttgtcgtcagctcgtgtcgtgagatgttgggttaagtcccgcaacgagcgcaacccttgatcttagttgccagcattcagttgggcactctaaggtgactgccggtgacaaaccggaggaaggtggggatgacgtcaaatcatcatgccccttatgacctgggctacacacgtgctacaatggacagaacaaagggcagcgaaaccgcgaggttaagccaatcccacaaatctgttctcagttcggatcgcagtctgcaactcgactgcgtgaagctggaatcgctagtaatcgcggatcagcatgccgcggtgaatacgttcccgggccttgtacacaccgcccgtcacaccacgagagtttgtaacacccgaagtcggtgaggtaacctttatggagccagccgccgaaggtgggacagatgattggggtgaagtcgtaacaaggtagccgtatcggaaggtgcggctggatcacctccttt

SEQ ID NO: 116 - DNA, 938 bp, Bacillus mojavensis
  source 1..938: mol_type = genomic DNA; note = SBI00592_16S rRNA
tgcaagtcgagcggacagatgggagcttgctccctgatgttagcggcggacgggtgagtaacacgtgggtaacctgcctgtaagactgggataactccgggaaaccggggctaataccggatgcttgtttgaaccgcatggttcaaacataaaaggtggcttcggctaccacttacagatggacccgcggcgcattagctagttggtgaggtaacggctcaccaaggcaacgatgcgtagccgacctgagagggtgatcggccacactgggactgagacacggcccagactcctacgggaggcagcagtagggaatcttccgcaatggacgaaagtctgacggagcaacgccgcgtgagtgatgaaggttttcggatcgtaaagctctgttgttagggaagaacaagtaccgttcgaatagggcggtaccttgacggtacctaaccagaaagccacggctaactacgtgccagcagccgcggtaatacgtaggtggcaagcgttgtccggaattattgggcgtaaagggctcgcaggcggttccttaagtctgatgtgaaagcccccggctcaaccggggagggtcattggaaactggggaacttgagtgcagaagaggagagtggaattccacgtgtagcggtgaaatgcgtagagatgtggaggaacaccagtggcgaaggcgactctctggtctgtaactgacgctgaggagcgaaagcgtggggagcgaacaggattagataccctggtagtccacgccgtaaacgatgagtgctaagtgttagggggtttccgccccttagtgctgcagctaacgcattaagcactccgcctggggagtacggtcgcaagactgaaactcaaaggaattgacgggggcccgcacaagcggtggagcatgtggtttaattcgaagcaacgcgaagaaccttacc

SEQ ID NO: 117 - DNA, 875 bp, Bacillus subtilis
  source 1..875: mol_type = genomic DNA; note = SBI00598_16S rRNA
ttagcggcggacgggtgagtaacacgtgggtaacctgcctgtaagactgggataactccgggaaaccggagctaataccggatagttccttgaaccgcatggttcaaggatgaaagacggtttcggctgtcacttacagatggacccgcggcgcattagctagttggtggggtaatggctcaccaaggcgacgatccgtaactggtctgagaggatgatcagtcacactggaactgagacacggtccagactcctacgggaggcagcagtggggaatattggacaatgggcgaaagcctgatccagccatgccgcgtgtgtgaagaaggtcttcggattgtaaagcactttaagttgggaggaagggttgtagattaatactctgcaattttgacgttaccgacagaataagcaccggctaactctgtgccagcagccgcggtaatacagagggtgcaagcgttaatcggaattactgggcgtaaagcgcgcgtaggtggtttgttaagttggatgtgaaatccccgggctcaacctgggaactgcattcaaaactgactgactagagtatggtagagggtggtggaatttcctgtgtagcggtgaaatgcgtagatataggaaggaacaccagtggcgaaggcgaccacctggactaatactgacactgaggtgcgaaagcgtggggagcaaacaggattagataccctggtagtccacgccgtaaacgatgtcaactagccgttggaagccttgagcttttagtggcgcagctaacgcattaagttgaccgcctggggagtacggccgcaaggttaaaactcaaatgaattgacgggggcccgcacaagcggtggagcatgtggtttaattcg

SEQ ID NO: 118 - DNA, 1549 bp, Bacillus aryabhattai
  source 1..1549: mol_type = genomic DNA; note = SBI00644_16S rRNA
tcggagagtttgatcctggctcaggatgaacgctggcggcgtgcctaatacatgcaagtcgagcgaactgattagaagcttgcttctatgacgttagcggcggacgggtgagtaacacgtgggcaacctgcctgtaagactgggataacttcgggaaaccgaagctaataccggataggatcttctccttcatgggagatgattgaaagatggtttcggctatcacttacagatgggcccgcggtgcattagctagttggtgaggtaacggctcaccaaggccacgatgcatagccgacctgagagggtgatcggccacactgggactgagacacggcccagactcctacgggaggcagcagtagggaatcttccgcaatggacgaaagtctgacggagcaacgccgcgtgagtgatgaaggctttcgggtcgtaaaactctgttgttagggaagaacaagtacaagagtaactgcttgtaccttgacggtacctaaccagaaagccacggctaactacgtgccagcagccgcggtaatacgtaggtggcaagcgttatccggaattattgggcgtaaagcgcgcgcaggcggtttcttaagtctgatgtgaaagcccacggctcaaccgtggagggtcattggaaactggggaacttgagtgcagaagagaaaagcggaattccacgtgtagcggtgaaatgcgtagagatgtggaggaacaccagtggcgaaggcggctttttggtctgtaactgacgctgaggcgcgaaagcgtggggagcaaacaggattagataccctggtagtccacgccgtaaacgatgagtgctaagtgttagagggtttccgccctttagtgctgcagctaacgcattaagcactccgcctggggagtacggtcgcaagactgaaactcaaaggaattgacgggggcccgcacaagcggtggagcatgtggtttaattcgaagcaacgcgaagaaccttaccaggtcttgacatcctctgacaactctagagatagagcgttccccttcgggggacagagtgacaggtggtgcatggttgtcgtcagctcgtgtcgtgagatgttgggttaagtcccgcaacgagcgcaacccttgatcttagttgccagcatttagttgggcactctaaggtgactgccggtgacaaaccggaggaaggtggggatgacgtcaaatcatcatgccccttatgacctgggctacacacgtgctacaatggatggtacaaagggctgcaagaccgcgaggtcaagccaatcccataaaaccattctcagttcggattgtaggctgcaactcgcctacatgaagctggaatcgctagtaatcgcggatcagcatgccgcggtgaatacgttcccgggccttgtacacaccgcccgtcacaccacgagagtttgtaacacccgaagtcggtggagtaaccgtaaggagctagccgcctaaggtgggacagatgattggggtgaagtcgtaacaaggtagccgtatcggaaggtgcggctggatcacctccttt

SEQ ID NO: 119 - DNA, 841 bp, Bacillus subtilis
  source 1..841: mol_type = genomic DNA; note = SBI00693_16S rRNA
tcgagcggacagatgggagcttgctccctgatgttagcggcggacgggtgagtaacacgtgggtaacctgcctgtaagactgggataactccgggaaaccggggctaataccggatggttgtttgaaccgcatggttcaaacataaaaggtggcttcggctaccacttacagatggacccgcggcgcattagctagttggtgaggtaacggctcaccaaggcaacgatgcgtagccgacctgagagggtgatcggccacactgggactgagacacggcccagactcctacgggaggcagcagtagggaatcttccgcaatggacgaaagtctgacggagcaacgccgcgtgagtgatgaaggttttcggatcgtaaagctctgttgttagggaagaacaagtaccgttcgaatagggcggtaccttgacggtacctaaccagaaagccacggctaactacgtgccagcagccgcggtaatacgtaggtggcaagcgttgtccggaattattgggcgtaaagggctcgcaggcggtttcttaagtctgatgtgaaagcccccggctcaaccggggagggtcattggaaactggggaacttgagtgcagaagaggagagtggaattccacgtgtagcggtgaaatgcgtagagatgtggaggaacaccagtggcgaaggcgactctctggtctgtaactgacgctgaggagcgaaagcgtggggagcgaacaggattagataccctggtagtccacgccgtaaacgatgagtgctaagtgttagggggtttccgccccttagtgctgcagctaacgcattaagcactccgcctgggggagtac

SEQ ID NO: 120 - DNA, 785 bp, Bacillus subtilis
  source 1..785: mol_type = genomic DNA; note = SBI00714_16S rRNA
tgcagtcgagcggacagatgggagcttgctccctgatgttagcggcggacgggtgagtaacacgtgggtaacctgcctgtaagactgggataactccgggaaaccggggctaataccggatgcttgtttgaaccgcatggttcaaacataaaaggtggcttcggctaccacttacagatggacccgcggcgcattagctagttggtgaggtaacggctcaccaaggcaacgatgcgtagccgacctgagagggtgatcggccacactgggactgagacacggcccagactcctacgggaggcagcagtagggaatcttccgcaatggacgaaagtctgacggagcaacgccgcgtgagtgatgaaggttttcggatcgtaaagctctgttgttagggaagaacaagtaccgttcgaatagggcggtaccttgacggtacctaaccagaaagccacggctaactacgtgccagcagccgcggtaatacgtaggtggcaagcgttgtccggaattattgggcgtaaagggctcgcaggcggtttcttaagtctgatgtgaaagcccccggctcaaccggggagggtcattggaaactggggaacttgagtgcagaagaggagagtggaattccacgtgtagcggtgaaatgcgtagagatgtggaggaacaccagtggcgaaggcgactctctggtctgtaactgacgctgaggagcgaaagcgtggggagcgaacaggattagataccctggtagtccacgccgtaaacgatgagtgctaagtgtt

SEQ ID NO: 121 - DNA, 785 bp, Bacillus safensis
  source 1..785: mol_type = genomic DNA; note = SBI00997_16S rRNA
tgcagtcgagcggacagaagggagcttgctcccggatgttagcggcggacgggtgagtaacacgtgggtaacctgcctgtaagactgggataactccgggaaaccggagctaataccggatagttccttgaaccgcatggttcaaggatgaaagacggtttcggctgtcacttacagatggacccgcggcgcattagctagttggtggggtaatggctcaccaaggcgacgatgcgtagccgacctgagagggtgatcggccacactgggactgagacacggcccagactcctacgggaggcagcagtagggaatcttccgcaatggacgaaagtctgacggagcaacgccgcgtgagtgatgaaggttttcggatcgtaaagctctgttgttagggaagaacaagtgcgagagtaactgctcgcaccttgacggtacctaaccagaaagccacggctaactacgtgccagcagccgcggtaatacgtaggtggcaagcgttgtccggaattattgggcgtaaagggctcgcaggcggtttcttaagtctgatgtgaaagcccccggctcaaccggggagggtcattggaaactgggaaacttgagtgcagaagaggagagtggaattccacgtgtagcggtgaaatgcgtagagatgtggaggaacaccagtggcgaaggcgactctctggtctgtaactgacgctgaggagcgaaagcgtggggagcgaacaggattagataccctggtagtccacgccgtaaacgatgagtgctaagtgtta

SEQ ID NO: 122 - DNA, 364 bp, Pichia membranifaciens
  source 1..364: mol_type = genomic DNA; note = SBI01187_ITS sequence
ctgtgtgggcgcacaaaacacctaaacctggagtatacacacgtcaacaaaagatctaaaagaataaaactttcaacaacggatctcttggttctcgcatcgatgaagagcgcagcgaaatgcgatacctagtgtgaattgcagccatcgtgaatcatcgagttcttgaacgcacattgcgcccgtcggtattccggcgggcatgcctgtctgagcgtcgtttccttcttgtgcaccggggtctttgcagatcctctctgcgcanagctggccgtgccactgggccggccgaaaagaaacgttgcggacaaaacgaactacatcgggacgctttggccgccgagcgaaaaaaaaaaccccattg

SEQ ID NO: 123 - DNA, 908 bp, Talaromyces atroroseus
  source 1..908: mol_type = genomic DNA; note = SBI01292_ITS sequence
cgcgggtccacctcccacccgtgtctcttgaataccctgttgctttggcgggcccaccgggacacccccggtcgccggggggcactgcgcccccgggcccgcgcccgccagagcgccgatgaacccgaatgaagaaggactgtctgagtctacgatataattatcaaaactttcaacaatggatctcttggttccggcatcgatgaagaacgcagcgaaatgcgataagtaatgtgaattgcagaattccgtgaatcatcgaatctttgaacgcacattgcgccccctggcattccggggggcatgcctgtccgagcgtcatttctgccctcaagcccggcttgtgtgttgggcgtggtccccccggtttcgggggggacctgcccgaaaggcagcggcgacgttccgcctaggtcctcgagcgtatggggctttgtcacccgctcgggaggggcctacgggcgttggccatccacccatttttttacggttgacctcggatcaggtaggagttacccgctgaacttaagcatatcaataagcggaggaaaagaaaccaaccgggattgcctcagtaacggcgagtgaagcggcaagagctcaaatttgaaatctggcccccctgggggtccgagttgtaatttggagaggatgcttcgggtacggtgcccatctaagtgccctggaacgggcggtcatagagggtgagaatcccgtatgggatgggcggccgtgcccgtgtgaagctccttcgacgagtcgagttgtttgggaatgcagctctaagcgggtggtaaatttcatctaaagctaaatactggccggagaccgatagcgcacaagtagagtgatcgaaagatgaaaagcactttgaaaagagagttaaacagcacgtgaaattgttgaaa

SEQ ID NO: 124 - DNA, 706 bp, Bacillus amyloliquefaciens
  source 1..706: mol_type = genomic DNA; note = SBI01595_16S rRNA
gtcgagcggacagatgggagcttgctccctgatgttagcggcggacgggtgagtaacacgtgggtaacctgcctgtaagactgggataactccgggaaaccggggctaataccggatggttgtctgaaccgcatggttcagacataaaaggtggcttcggctaccacttacagatggacccgcggcgcattagctagttggtgaggtaacggctcaccaaggcgacgatgcgtagccgacctgagagggtgatcggccacactgggactgagacacggcccagactcctacgggaggcagcagtagggaatcttccgcaatggacgaaagtctgacggagcaacgccgcgtgagtgatgaaggttttcggatcgtaaagctctgttgttagggaagaacaagtgccgttcaaatagggcggcaccttgacggtacctaaccagaaagccacggctaactacgtgccagcagccgcggtaatacgtaggtggcaagcgttgtccggaattattgggcgtaaagggctcgcaggcggtttcttaagtctgatgtgaaagcccccggctcaaccggggagggtcattggaaactggggaacttgagtgcagaagaggagagtggaattccacgtgtagcggtgaaatgcgtagagatgtggaggaacaccagtggcgaaggcgactctctggtctgtaactgacgctga

SEQ ID NO: 125 - DNA, 927 bp, Candida sp.
  source 1..927: mol_type = genomic DNA; note = SBI01679_ITS sequence
ttgcgcggcgaaaaaccttacacactatgtttttttaatttgaaactattgctttggtctggcttagaaataggttgggccaaaggttttatcaaaacttcaatatttattattgaattgttatttttaattttatgtcaatttgttgattaatatcaaaaatcttcaaaactttcaacaacggatctcttggttctcgcatcgatgaagaacgcagcgaaatgcgataagtaatatgaattgcagattttcgtgaatcatcgaatctttgaacgcacattgcgccctttggtattccaaagggcatgcctgtttgagcgtcatttctctctcaaatcttcggatttggttttgagtgatactcttagtcagactaagcgtttgcttgaaatgtattggcatgagtggtactagatagtgctgaactgttttcaatgtattaggtttatccaactcattgaccagtaaagtatttgtttattacacaggctcggccttacaacaacaaacaaagtttgacctcaaatcaggtaggactacccgctgaacttaagcatatcaataagcggaggaaaagaaaccaacagggattgccttagtaacggcgagtgaagcggcaaaagctcaaatttgaaatctagcactttcagtgttcgagttgtaatttgaagaaggtaactttggaattggctcttgtctatgttccttggaacaggacgtcacagagggtgagaatcccgtgcgatgagatgtccaattctatgtaaagtgctttcgaagagtcgagttgtttgggaatgcagctctaagtgggtggtaaattccatctaaagctaaatattggcgagagaccgatagcgaacaagtacagtgatggaaagatgaaaagaactttgaaaagagagtgaaaaagtacgtgaaattgtt

SEQ ID NO: 126 - DNA, 922 bp, Candida salmanticensis
  source 1..922: mol_type = genomic DNA; note = SBI01681_ITS sequence
caccaaattaattttctttttcaatcgtttttataataaaaactttcaacaacggatctcttggttctcgcatcgatgaagaacgcagcgaattgcgatacgtaatatgacttgcagacgtgaatcattgaatctttgaacgcacattgcgccttgaggtattcctcaaggcatgcctgtttgagcgtcggctcctttcaaaccctagggtttggctttgcctccgaaatattaggatctaatgcaatacgtttcattaatccaaattcttcgccctcaaatcaggtaagactacccgctgaacttaagcatatcaataagcggaggaaaagaaaccaacagggattgcctcagtaacggcgagtgaagcggcaaaagctcaaatttgaaatccttcgggagttgtaatttgaaggtgagatggcgacttcaagtctggctaaagtcccttggaacagggcgccttagagggtgagagccccgtacaaccagttcttgaagtcatatgctttctctccaacgagtcgagttgtttgggaatgcagctcaaagtgggtggtaaattccatctaaagctaaataccggcgagagaccgatagcgaacaagtaccgtgagggaaagatgaaaagcactttgaaaagagagtgaaacagtacgtgaaattgttgaaagggaagggcttgcaagcagacacaaccctcgtggttgggccagcatcggttgctaggggtggataaggcggcgggaatgtagcttcctcggaagtattatatcccgctgagatacacccaccggcgaccgaggcctgcgatttttaatcaaggatgctggcgtaatggttgcaagccgcccgtcttgaaacacggaccaaggagtctaacgtctatgcaagtgtttgggtgaataaaaccccagcgcgg

SEQ ID NO: 127 - DNA, 950 bp, Pichia fermentans
  source 1..950: mol_type = genomic DNA; note = SBI01683_ITS sequence
cactgcgtgggcgacacgaaacaccgaaaccgaacgcacgccgtcaagcaagaaatccacaaaactttcaacaacggatctcttggttctcgcatcgatgaagagcgcagcgaaatgcgatacctagtgtgaattgcagccatcgtgaatcatcgagttcttgaacgcacattgcgcccgctggtattccggcgggcatgcctgtctgagcgtcgtttccttcttggagcggagcttcagacctggcgggctgtctttcgggacggcgcgcccaaagcgaggggctttctgcgcgaactagactgtgcgcgcggggcggccggcgaacttattaccaagctcgacctcagatcaggcaggagtacccgctgaacttaagcatatcaataagcggaggaaaagaaaccaacagggattgccccagtagcggcgagtgaagcggcaaaagctcagatttggaatcgcttcggcgagttgtgaattgcaggttggcgcctctgcggcggcggcggtccaagtcccttggaacagggcgccattgagggtgagagccccgtgggaccgtttgcctaagctctgaggcccttctgacgagtcgagttgtttgggaatgcagctctaagcgggtggtaaattccatctaaggctaaatactggcgagagaccgatagcgaacaagtactgtgaaggaaagatgaaaagcactttgaaaagagagtgaaacagcacgtgaaattgttgaaagggaagggtattgcgcccgacatggagcgtgcgcaccgctgcccctcgtgggcggcgctctgggcgtgctctgggccagcatcggtttttgccgcgggagaagggcggcgggcatgtagctcttcggagtgttatagcctgccgccggcgccgcgagcggggaccgaggactgcgacttttgtctcggatgctggcacaacggcgc

SEQ ID NO: 128 - DNA, 763 bp, Bacillus pumilus
  source 1..763: mol_type = genomic DNA; note = SBI01819_16S rRNA
tgcagtcgagcggacagaagggagcttgctcccggatgttagcggcggacgggtgagtaacacgtgggtaacctgcctgtaagactgggataactccgggaaaccggagctaataccggatagttccttgaaccgcatggttcaaggatgaaagacggtttcggctgtcacttacagatggacccgcggcgcattagctagttggtggggtaatggctcaccaaggcgacgatgcgtagccgacctgagagggtgatcggccacactgggactgagacacggcccagactcctacgggaggcagcagtagggaatcttccgcaatggacgaaagtctgacggagcaacgccgcgtgagtgatgaaggttttcggatcgtaaagctctgttgttagggaagaacaagtgcgagagtaactgctcgcaccttgacggtacctaaccagaaagccacggctaactacgtgccagcagccgcggtaatacgtaggtggcaagcgttgtccggaattattgggcgtaaagggctcgcaggcggtttcttaagtctgatgtgaaagcccccggctcaaccggggagggtcattggaaactgggaaacttgagtgcagaagaggagagtggaattccacgtgtagcggtgaaatgcgtagagatgtggaggaacaccagtggcgaaggcgactctctggtctgtaactgacgctgaggagcgaaagcgtggggagcgaacaggattagataccctggtagtccacgccgt

SEQ ID NO: 129 - DNA, 1463 bp, Bacillus amyloliquefaciens
  source 1..1463: mol_type = genomic DNA; note = SBI02181_16S rRNA
gagagtttgatcctggctcaggacgaacgctggcggcgtgcctaatacatgcaagtcgagcggacagatgggagcttgctccctgatgttagcggcggacgggtgagtaacacgtgggtaacctgcctgtaagactgggataactccgggaaaccggggctaataccggatggttgtctgaaccgcatggttcagacataaaaggtggcttcggctaccacttacagatggacccgcggcgcattagctagttggtgaggtaacggctcaccaaggcgacgatgcgtagccgacctgagagggtgatcggccacactgggactgagacacggcccagactcctacgggaggcagcagtagggaatcttccgcaatggacgaaagtctgacggagcaacgccgcgtgagtgatgaaggttttcggatcgtaaagctctgttgttagggaagaacaagtgccgttcaaatagggcggcaccttgacggtacctaaccagaaagccacggctaactacgtgccagcagccgcggtaatacgtaggtggcaagcgttgtccggaattattgggcgtaaagggctcgcaggcggtttcttaagtctgatgtgaaagcccccggctcaaccggggagggtcattggaaactggggaacttgagtgcagaagaggagagtggaattccacgtgtagcggtgaaatgcgtagagatgtggaggaacaccagtggcgaaggcgactctctggtctgtaactgacgctgaggagcgaaagcgtggggagcgaacaggattagataccctggtagtccacgccgtaaacgatgagtgctaagtgttagggggtttccgccccttagtgctgcagctaacgcattaagcactccgcctggggagtacggtcgcaagactgaaactcaaaggaattgacgggggcccgcacaagcggtggagcatgtggtttaattcgaagcaacgcgaagaaccttaccaggtcttgacatcctctgacaatcctagagataggacgtccccttcgggggcagagtgacaggtggtgcatggttgtcgtcagctcgtgtcgtgagatgttgggttaagtcccgcaacgagcgcaacccttgatcttagttgccagcattcagttgggcactctaaggtgactgccggtgacaaaccggaggaaggtggggatgacgtcaaatcatcatgccccttatgacctgggctacacacgtgctacaatggacagaacaaagggcagcgaaaccgcgaggttaagccaatcccacaaatctgttctcagttcggatcgcagtctgcaactcgactgcgtgaagctggaatcgctagtaatcgcggatcagcatgccgcggtgaatacgttcccgggccttgtacacaccgcccgtcacaccacgagagtttgtaacacccgaagtcggtgaggtaacctttatggagccag

SEQ ID NO: 130 - DNA, 1325 bp, Bacillus licheniformis
  source 1..1325: mol_type = genomic DNA; note = SBI02185_16S rRNA
cacttacagatggacccgcggcgcattagctagttggtgaggtaacggctcaccaaggcaacgatgcgtagccgacctgagagggtgatcggccacactgggactgagacacggcccagactcctacgggaggcagcagtagggaatcttccgcaatggacgaaagtctgacggagcaacgccgcgtgagtgatgaaggttttcggatcgtaaaactctgttgttagggaagaacaagtaccgttcgaatagggcggtaccttgacggtacctaaccagaaagccacggctaactacgtgccagcagccgcggtaatacgtaggtggcaagcgttgtccggaattattgggcgtaaagcgcgcgcaggcggtttcttaagtctgatgtgaaagcccccggctcaaccggggagggtcattggaaactggggaacttgagtgcagaagaggagagtggaattccacgtgtagcggtgaaatgcgtagagatgtggaggaacaccagtggcgaaggcgactctctggtctgtaactgacgctgaggcgcgaaagcgtggggagcgaacaggattagataccctggtagtccacgccgtaaacgatgagtgctaagtgttagagggtttccgccctttagtgctgcagcaaacgcattaagcactccgcctggggagtacggtcgcaagactgaaactcaaaggaattgacgggggcccgcacaagcggtggagcatgtggtttaattcgaagcaacgcgaagaaccttaccaggtcttgacatcctctgacaaccctagagatagggcttccccttcgggggcagagtgacaggtggtgcatggttgtcgtcagctcgtgtcgtgagatgttgggttaagtcccgcaacgagcgcaacccttgatcttagttgccagcattcagttgggcactctaaggtgactgccggtgacaaaccggaggaaggtggggatgacgtcaaatcatcatgccccttatgacctgggctacacacgtgctacaatgggcagaacaaagggcagcgaagccgcgaggctaagccaatcccacaaatctgttctcagttcggatcgcagtctgcaactcgactgcgtgaagctggaatcgctagtaatcgcggatcagcatgccgcggtgaatacgttcccgggccttgtacacaccgcccgtcacaccacgagagtttgtaacacccgaagtcggtgaggtaaccttttggagccagccgccgaaggtgggacagatgattggggtgaagtcgtaacaaggtagccgtatcggaaggtgcggctggatcacctccttt

SEQ ID NO: 131 - DNA, 1544 bp, Bacillus pumilus
  source 1..1544: mol_type = genomic DNA; note = SBI02354_16S rRNA
ggagagtttgatcctggctcaggacgaacgctggcggcgtgcctaatacatgcaagtcgagcggacagaagggagcttgctcccggatgttagcggcggacgggtgagtaacacgtgggtaacctgcctgtaagactgggataactccgggaaaccggagctaataccggatagttccttgaaccgcatggttcaaggatgaaagacggtttcggctgtcacttacagatggacccgcggcgcattagctagttggtgaggtaacggctcaccaaggcgacgatgcgtagccgacctgagagggtgatcggccacactgggactgagacacggcccagactcctacgggaggcagcagtagggaatcttccgcaatggacgaaagtctgacggagcaacgccgcgtgagtgatgaaggttttcggatcgtaaagctctgttgttagggaagaacaagtgcaagagtaactgcttgcaccttgacggtacctaaccagaaagccacggctaactacgtgccagcagccgcggtaatacgtaggtggcaagcgttgtccggaattattgggcgtaaagggctcgcaggcggtttcttaagtctgatgtgaaagcccccggctcaaccggggagggtcattggaaactgggaaacttgagtgcagaagaggagagtggaattccacgtgtagcggtgaaatgcgtagagatgtggaggaacaccagtggcgaaggcgactctctggtctgtaactgacgctgaggagcgaaagcgtggggagcgaacaggattagataccctggtagtccacgccgtaaacgatgagtgctaagtgttagggggtttccgccccttagtgctgcagctaacgcattaagcactccgcctggggagtacggtcgcaagactgaaactcaaaggaattgacgggggcccgcacaagcggtggagcatgtggtttaattcgaagcaacgcgaagaaccttaccaggtcttgacatcctctgacaaccctagagatagggctttcccttcggggacagagtgacaggtggtgcatggttgtcgtcagctcgtgtcgtgagatgttgggttaagtcccgcaacgagcgcaacccttgatcttagttgccagcattcagttgggcactctaaggtgactgccggtgacaaaccggaggaaggtggggatgacgtcaaatcatcatgccccttatgacctgggctacacacgtgctacaatggacagaacaaagggctgcgagaccgcaaggtttagccaatcccacaaatctgttctcagttcggatcgcagtctgcaactcgactgcgtgaagctggaatcgctagtaatcgcggatcagcatgccgcggtgaatacgttcccgggccttgtacacaccgcccgtcacaccacgagagtttgcaacacccgaagtcggtgaggtaacctttatggagccagccgccgaaggtggggcagatgattggggtgaagtcgtaacaaggtagccgtatcggaaggtgcggctggatcacctccttt

SEQ ID NO: 132 - DNA, 921 bp, Meyerozyma guilliermondii
  source 1..921: mol_type = genomic DNA; note = SBI02945_ITS sequence
cgcttactgcgcggcgaaaaaccttacacacagtgtctttttgatacagaactcttgctttggtttggcctagagataggttgggccagaggtttaacaaaacacaatttaattatttttacagttagtcaaattttgaattaatcttcaaaactttcaacaacggatctcttggttctcgcatcgatgaagaacgcagcgaaatgcgataagtaatatgaattgcagattttcgtgaatcatcgaatctttgaacgcacattgcgccctctggtattccagagggcatgcctgtttgagcgtcatttctctctcaaacccccgggtttggtattgagtgatactcttagtcggactaggcgtttgcttgaaaagtattggcatgggtagtactagatagtgctgtcgacctctcaatgtattaggtttatccaactcgttgaatggtgtggcgggatatttctggtattgttggcccggccttacaacaaccaaacaagtttgacctcaaatcaggtaggaatacccgctgaacttaagcatatcaataagcggaggaaaagaaaccaacagggattgccttagtagcggcgagtgaagcggcaaaagctcaaatttgaaatctggcgccttcggtgtccgagttgtaatttgaagattgtaaccttggggttggctcttgtctatgtttcttggaacaggacgtcacagagggtgagaatcccgtgcgatgagatgcccaattctatgtaaggtgctttcgaagagtcgagttgtttgggaatgcagctctaagtgggtggtaaattccatctaaagctaaatattggcgagagaccgatagcgaacaagtacagtgatggaaagatgaaaagaactttgaaaagagagtgaaaaagtacgtgaaattgttgaaaggga

SEQ ID NO: 133 - DNA, 1404 bp, Bacillus altitudinis
  source 1..1404: mol_type = genomic DNA; note = SBI03005_16S rRNA
acagaagggagaaaccggagctaataccggatagttccttgaaccgcatggttcaaggatgaaagacggtttcggctgtcacttacagatggacccgcggcgcattagctagttggtgaggtaacggctcaccaaggcgacgatgcgtagccgacctgagagggtgatcggccacactgggactgagacacggcccagactcctacgggaggcagcagtagggaatcttccgcaatggacgaaagtctgacggagcaacgccgcgtgagtgatgaaggttttcggatcgtaaagctctgttgttagggaagaacaagtgcaagagtaactgcttgcaccttgacggtacctaaccagaaagccacggctaactacgtgccagcagccgcggtaatacgtaggtggcaagcgttgtccggaattattgggcgtaaagggctcgcaggcggtttcttaagtctgatgtgaaagcccccggctcaaccggggagggtcattggaaactgggaaacttgagtgcagaagaggagagtggaattccacgtgtagcggtgaaatgcgtagagatgtggaggaacaccagtggcgaaggcgactctctggtctgtaactgacgctgaggagcgaaagcgtggggagcgaacaggattagataccctggtagtccacgccgtaaacgatgagtgctaagtgttagggggtttccgccccttagtgctgcagctaacgcattaagcactccgcctggggagtacggtcgcaagactgaaactcaaaggaattgacgggggcccgcacaagcggtggagcatgtggtttaattcgaagcaacgcgaagaaccttaccaggtcttgacatcctctgacaaccctagagatagggctttcccttcggggacagagtgacaggtggtgcatggttgtcgtcagctcgtgtcgtgagatgttgggttaagtcccgcaacgagcgcaacccttgatcttagttgccagcatttagttgggcactctaaggtgactgccggtgacaaaccggaggaaggtggggatgacgtcaaatcatcatgccccttatgacctgggctacacacgtgctacaatggacagaacaaagggctgcgagaccgcaaggtttagccaatcccacaaatctgttctcagttcggatcgcagtctgcaactcgactgcgtgaagctggaatcgctagtaatcgcggatcagcatgccgcggtgaatacgttcccgggccttgtacacaccgcccgtcacaccacgagagtttgcaacacccgaagtcggtgaggtaacctttatggagccagccgccgaaggtggggcagatgattggggtgaagtcgtaacaaggtagccgtatcggaaggtgcggctggatcacctccttt

SEQ ID NO: 134 - DNA, 838 bp, Candida dosseyi
  source 1..838: mol_type = genomic DNA; note = SBI03199_ITS sequence
acatgtttttgaacaacaccaaattaattttctttttcaatcgtttttataataaaaactttcaacaacggatctcttggttctcgcatcgatgaagaacgcagcgaattgcgatacgtaatatgacttgcagacgtgaatcattgaatctttgaacgcacattgcgccttgaggtattcctcaaggcatgcctgtttgagcgtcggctcctttcaaaccctagggtttggctttgcctccgaaatattaggatctaatgcaatacgtttcattaatccaaattcttcgccctcaaatcaggtaagactacccgctgaacttaagcatatcaataagcggaggaaaagaaaccaacagggattgcctcagtaacggcgagtgaagcggcaaaagctcaaatttgaaatccttcgggagttgtaatttgaaggtgagatggcgacttcaagtctggctaaagtcccttggaacagggcgccttagagggtgagagccccgtacaaccagttcttgaagtcatatgctttctctccaacgagtcgagttgtttgggaatgcagctcaaagtgggtggtaaattccatctaaagctaaataccggcgagagaccgatagcgaacaagtaccgtgagggaaagatgaaaagcactttgaaaagagagtgaaacagtacgtgaaattgttgaaagggaagggcttgcaagcagacacaaccctcgtggttgggccagcatcggttgctaggggtggataaggcggcgggaatgtagcttcctcggaagtattatatcccgctgagatacacccaccggcgancgaggcctgcgatttttaatc

SEQ ID NO: 135 - DNA, 1550 bp, Bacillus endophyticus
  source 1..1550: mol_type = genomic DNA; note = SBI03599_16S rRNA
tatggagagtttgatcctggctcaggacgaacgctggcggcgtgcctaatacatgcaagtcgagcggagatttgaaaagcttgcttttcaaatcttagcggcggacgggtgagtaacacgtgggcaacctgcccttgagacggggataactccgggaaaccggagctaataccggataacacatatcttcgcatgaggatatgttagaaggtggcttttagctaccactcaaggatgggcccgcggcgcattagctagttggtgaggtaacggctcaccaaggcgacgatgcgtagccgacctgagagggtgatcggccacactgggactgagacacggcccagactcctacgggaggcagcagtagggaatcttccgcaatggacgaaagtctgacggagcaacgccgcgtgagtgatgaaggttttcggatcgtaaagctctgttgttagggaagaacaagtacctgttaaataagcaggtaccttgacggtacctaaccagaaagccacggctaactacgtgccagcagccgcggtaatacgtaggtggcaagcgttgtccggaattattgggcgtaaagcgcgcgcaggcggttccttaagtctgatgtgaaagcccacggctcaaccgtggagggtcattggaaactggggaacttgagtgcagaagaggagagcggaattccacgtgtagcggtgaaatgcgtagagatgtggaggaacaccagtggcgaaggcggctctctggtctgtaactgacgctgaggcgcgaaagcgtggggagcgaacaggattagataccctggtagtccacgccgtaaacgatgagtgctaagtgttagagggtttccgccctttagtgctgcagcaaacgcattaagcactccgcctggggagtacggtcgcaagactgaaactcaaaggaattgacggggacccgcacaagcggtggagcatgtggtttaattcgaagcaacgcgaagaaccttaccaggtcttgacatcctctgctacttctagagatagaaggttcccttcggggacagagtgacaggtggtgcatggttgtcgtcagctcgtgtcgtgagatgttgggttaagtcccgcaacgagcgcaacccttgatcttagttgccagcattcagttgggcactctaaggtgactgccggtgacaaaccggaggaaggtggggatgacgtcaaatcatcatgccccttatgacctgggctacacacgtgctacaatggatggtacaaagggctgcaaaaccgtgaggtcgagccaatcccataaaaccattctcagttcggattgtaggctgcaactcgcctacatgaagccggaatcgctagtaatcgcggatcagcatgccgcggtgaatacgttcccgggtcttgtacacaccgcccgtcacaccacgagagtttgtaacacccgaagtcggtgaggtaaccttttggagccagccgccgaaggtgggacagatgattggggtgaagtcgtaacaaggtagccgtatcggaaggtgcggctggatcacctccttt

SEQ ID NO: 136 - DNA, 1547 bp, Bacillus subtilis
  source 1..1547: mol_type = genomic DNA; note = SBI03602_16S rRNA
tcggagagtttgatcctggctcaggacgaacgctggcggcgtgcctaatacatgcaagtcgagcggacagatgggagcttgctccctgatgttagcggcggacgggtgagtaacacgtgggtaacctgcctgtaagactgggataactccgggaaaccggggctaataccggatggttgtttgaaccgcatggttcaaacataaaaggtggcttcggctaccacttacagatggacccgcggcgcattagctagttggtgaggtaacggctcaccaaggcaacgatgcgtagccgacctgagagggtgatcggccacactgggactgagacacggcccagactcctacgggaggcagcagtagggaatcttccgcaatggacgaaagtctgacggagcaacgccgcgtgagtgatgaaggttttcggatcgtaaagctctgttgttagggaagaacaagtaccgttcgaatagggcggtaccttgacggtacctaaccagaaagccacggctaactacgtgccagcagccgcggtaatacgtaggtggcaagcgttgtccggaattattgggcgtaaagggctcgcaggcggtttcttaagtctgatgtgaaagcccccggctcaaccggggagggtcattggaaactggggaacttgagtgcagaagaggagagtggaattccacgtgtagcggtgaaatgcgtagagatgtggaggaacaccagtggcgaaggcgactctctggtctgtaactgacgctgaggagcgaaagcgtggggagcgaacaggattagataccctggtagtccacgccgtaaacgatgagtgctaagtgttagggggtttccgccccttagtgctgcagctaacgcattaagcactccgcctggggagtacggtcgcaagactgaaactcaaaggaattgacgggggcccgcacaagcggtggagcatgtggtttaattcgaagcaacgcgaagaaccttaccaggtcttgacatcctctgacaatcctagagataggacgtccccttcgggggcagagtgacaggtggtgcatggttgtcgtcagctcgtgtcgtgagatgttgggttaagtcccgcaacgagcgcaacccttgatcttagttgccagcattcagttgggcactctaaggtgactgccggtgacaaaccggaggaaggtggggatgacgtcaaatcatcatgccccttatgacctgggctacacacgtgctacaatggacagaacaaagggcagcgaaaccgcgaggttaagccaatcccacaaatctgttctcagttcggatcgcagtctgcaactcgactgcgtgaagctggaatcgctagtaatcgcggatcagcatgccgcggtgaatacgttcccgggccttgtacacaccgcccgtcacaccacgagagtttgtaacacccgaagtcggtgaggtaaccttttaggagccagccgccgaaggtgggacagatgattggggtgaagtcgtaacaaggtagccgtatcggaaggtgcggctggatcacctccttt

SEQ ID NO: 137 - DNA, 1265 bp, Bacillus subtilis; identical to SEQ ID NO: 92
  source 1..1265: mol_type = genomic DNA; note = SBI04006_16S rRNA

SEQ ID NO: 138 - DNA, 1549 bp, Bacillus megaterium
  source 1..1549: mol_type = genomic DNA; note = SBI04011_16S rRNA
tcggagagtttgatcctggctcaggatgaacgctggcggcgtgcctaatacatgcaagtcgagcgaactgattagaagcttgcttctatgacgttagcggcggacgggtgagtaacacgtgggcaacctgcctgtaagactgggataacttcgggaaaccgaagctaataccggataggatcttctccttcatgggagatgattgaaagatggtttcggctatcacttacagatgggcccgcggtgcattagctagttggtgaggtaacggctcaccaaggcaacgatgcatagccgacctgagagggtgatcggccacactgggactgagacacggcccagactcctacgggaggcagcagtagggaatcttccgcaatggacgaaagtctgacggagcaacgccgcgtgagtgatgaaggctttcgggtcgtaaaactctgttgttagggaagaacaagtacgagagtaactgctcgtaccttgacggtacctaaccagaaagccacggctaactacgtgccagcagccgcggtaatacgtaggtggcaagcgttatccggaattattgggcgtaaagcgcgcgcaggcggtttcttaagtctgatgtgaaagcccacggctcaaccgtggagggtcattggaaactggggaacttgagtgcagaagagaaaagcggaattccacgtgtagcggtgaaatgcgtagagatgtggaggaacaccagtggcgaaggcggctttttggtctgtaactgacgctgaggcgcgaaagcgtggggagcaaacaggattagataccctggtagtccacgccgtaaacgatgagtgctaagtgttagagggtttccgccctttagtgctgcagctaacgcattaagcactccgcctggggagtacggtcgcaagactgaaactcaaaggaattgacgggggcccgcacaagcggtggagcatgtggtttaattcgaagcaacgcgaagaaccttaccaggtcttgacatcctctgacaactctagagatagagcgttccccttcgggggacagagtgacaggtggtgcatggttgtcgtcagctcgtgtcgtgagatgttgggttaagtcccgcaacgagcgcaacccttgatcttagttgccagcattcagttgggcactctaaggtgactgccggtgacaaaccggaggaaggtggggatgacgtcaaatcatcatgccccttatgacctgggctacacacgtgctacaatggatggtacaaagggctgcaagaccgcgaggtcaagccaatcccataaaaccattctcagttcggattgtaggctgcaactcgcctacatgaagctggaatcgctagtaatcgcggatcagcatgccgcggtgaatacgttcccgggccttgtacacaccgcccgtcacaccacgagagtttgtaacacccgaagtcggtggagtaaccgtaaggagctagccgcctaaggtgggacagatgattggggtgaagtcgtaacaaggtagccgtatcggaaggtgcggctggatcacctccttt

SEQ ID NO: 139 - DNA, 1478 bp, Bacillus paralicheniformis
  source 1..1478: mol_type = genomic DNA; note = SBI04173_16S rRNA
tcggagagtttgatcctggctcaggacgaacgctggcggcgtgcctaatacatgcaagtcgagcggacagatgggagcttgctccctgatgttagcggcggggatgcttgattgaaccgcatggttcaattataaaaggtggcttttagctaccacttacagatggacccgcggcgcattagctagttggtgaggtaacggctcaccaaggcaacgatgcgtagccgacctgagagggtgatcggccacactgggactgagacacggcccagactcctacgggaggcagcagtagggaatcttccgcaatggacgaaagtctgacggagcaacgccgcgtgagtgatgaaggttttcggatcgtaaaactctgttgttagggaagaacaagtaccgttcgaatagggcggtaccttgacggtacctaaccagaaagccacggctaactacgtgccagcagccgcggtaatacgtaggtggcaagcgttgtccggaattattgggcgtaaagcgcgcgcaggcggtttcttaagtctgatgtgaaagcccccggctcaaccggggagggtcattggaaactggggaacttgagtgcagaagaggagagtggaattccacgtgtagcggtgaaatgcgtagagatgtggaggaacaccagtggcgaaggcgactctctggtctgtaactgacgctgaggcgcgaaagcgtggggagcgaacaggattagataccctggtagtccacgccgtaaacgatgagtgctaagtgttagagggtttccgccctttagtgctgcagcaaacgcattaagcactccgcctggggagtacggtcgcaagactgaaactcaaaggaattgacgggggcccgcacaagcggtggagcatgtggtttaattcgaagcaacgcgaagaaccttaccaggtcttgacatcctctgacaaccctagagatagggcttccccttcgggggcagagtgacaggtggtgcatggttgtcgtcagctcgtgtcgtgagatgttgggttaagtcccgcaacgagcgcaacccttgatcttagttgccagcattcagttgggcactctaaggtgactgccggtgacaaaccggaggaaggtggggatgacgtcaaatcatcatgccccttatgacctgggctacacacgtgctacaatgggcagaacaaagggcagcgaagccgcgaggctaagccaatcccacaaatctgttctcagttcggatcgcagtctgcaactcgactgcgtgaagctggaatcgctagtaatcgcggatcagcatgccgcggtgaatacgttcccgggccttgtacacaccgcccgtcacaccacgagagtttgtaacacccgaagtcggtgaggtaaccttttggagccagccgccgaaggtgggacagatgattggggtgaagtcgtaacaaggtagccgtatcggaaggtgcggctggatcacctccttt

SEQ ID NO: 140 - DNA, 778 bp, Pediococcus ethanolidurans
  source 1..778: mol_type = genomic DNA; note = SBI04873_16S rRNA
tgcaagtcgaacgcactttcgttaattgattttgagatgcttgcatcgaagatgattttaactataaagtgagtggcgaacgggtgagtaacacgtgggtaacctgcccagaagtgggggataacacctggaaacagatgctaataccgcataacaaaattaaccgcatggttgatttttaaaagatggcttcggctatcacttctggatggacccgcggcgtattagctagttggtgagataaaggctcaccaaggcagtgatacgtagccgacctgagagggtaatcggccacattgggactgagacacggcccagactcctacgggaggcagcagtagggaatcttccacaatggacgcaagtctgatggagcaacgccgcgtgagtgatgaaggctttcgggtcgtaaaactctgttgttggagaagaacgtgtgtgagagtaactgctcatgcagtgacggtatccaaccagaaagccacggctaactacgtgccagcagccgcggtaatacgtaggtggcaagcgttatccggatttattgggcgtaaagcgagcgcaggcggtcttttaagtctaatgtgaaagccttcggcttaaccgaagaagtgcattggaaactgggagacttgagtgcagaagaggagagtggaactccatgtgtagcggtgaaatgcgtagatatatggaagaacaccagtggcgaanncggctctctggtctgcaactgacgctgaggctcgaaagcatgggtagcgaacaggattagataccc

SEQ ID NO: 141 - DNA, 770 bp, Lactobacillus buchneri
  source 1..770: mol_type = genomic DNA; note = SBI04874_16S rRNA
gtcgtacgcgtctccgttgatgatttnaggtgcttgcacttgaaagattcaacattgagacgagtggcgaactggtgagtaacacgtgggtaacctgcccttgaagtaggggataacacttggaaacaggtgctaataccgtataacaaccaaaaccacctggttttggtttaaaagacggcttcggctgtcactttaggatggacccgcggcgtattagcttgttggtaaggtaacggcctaccaaggcgatgatacgtagccgacctgagagggtaatcggccacattgggactgagacacggcccaaactcctacgggaggcagcagtagggaatcttccacaatggacgaaagtctgatggagcaacgccgcgtgagtgatgaagggtttcggctcgtaaaactctgttgttggagaagaacaggtgtcagagcaactgttgacatcttgacggtatccaaccagaaagccacggctaactacgtgccagcagccgcggtaatacgtaggtggcaagcgttgtccggatttattgggcgtaaagcgagcgcaggcggttttttaggtctgatgtgaaagccttcggcttaaccggagaagtgcatcggaaaccgggaggcttgagtgcagaagaggacagtggaactccatgtgtagcggtgaaatgcgtagatatatggaagaacaccagtggcgaanncggctgtctggtctgtaactgacgctgaggctcgaaagcatgggtagcgaacaggattagataccc

SEQ ID NO: 142 - DNA, 681 bp, Bacillus amyloliquefaciens
  source 1..681: mol_type = genomic DNA; note = SBI04877_16S rRNA
tgcaagtcgagcggacagatgggagcttgctccctgatgttagcggcggacgggtgagtaacacgtgggtaacctgcctgtaagactgggataactccgggaaaccggggctaataccggatggttgtttgaaccgcatggttcagacataaaaggtggcttcggctaccacttacagatggacccgcggcgcattagctagttggtgaggtaacggctcaccaaggcgacgatgcgtagccgacctgagagggtgatcggccacactgggactgagacacggcccagactcctacgggaggcagcagtagggaatcttccgcaatggacgaaagtctgacggagcaacgccgcgtgagtgatgaaggttttcggatcgtaaagctctgttgttagggaagaacaagtgccgttcaaatagggcggcaccttgacggtacctaaccagaaagccacggctaactacgtgccagcagccgcggtaatacgtaggtggcaagcgttgtccggaattattgggcgtaaagggctcgcaggcggtttcttaagtctgatgtgaaagcccccggctcaaccggggagggtcattggaaactggggaacttgagtgcagaagaggagagtggaattccacgtgtagcggtgaaatgcgtagagatgtggaggaacaccagtggcgaa

SEQ ID NO: 143 - DNA, 923 bp, Pediococcus pentosaceus
  source 1..923: mol_type = genomic DNA; note = SBI04880_16S rRNA
tgcagtcgaacgaacttccgttaattgattatgacgtacttgtactgattgagattttaacacgaagtgagtggcgaacgggtgagtaacacgtgggtaacctgcccagaagtaggggataacacctggaaacagatgctaataccgtataacagagaaaaccgcatggttttcttttaaaagatggctctgctatcacttctggatggacccgcggcgtattagctagttggtgaggcaaaggctcaccaaggcagtgatacgtagccgacctgagagggtaatcggccacattgggactgagacacggcccagactcctacgggaggcagcagtagggaatcttccacaatggacgcaagtctgatggagcaacgccgcgtgagtgaagaagggtttcggctcgtaaagctctgttgttaaagaagaacgtgggtaagagtaactgtttacccagtgacggtatttaaccagaaagccacggctaactacgtgccagcagccgcggtaatacgtaggtggcaagcgttatccggatttattgggcgtaaagcgagcgcaggcggtcttttaagtctaatgtgaaagccttcggctcaaccgaagaagtgcattggaaactgggagacttgagtgcagaagaggacagtggaactccatgtgtagcggtgaaatgcgtagatatatggaagaacaccagtggcgaaggcggctgtctggtctgcaactgacgctgaggctcgaaagcatgggtagcgaacaggattagataccctggtagtccatgccgtaaacgatgattactaagtgttggagggtttccgcccttcagtgctgcagctaacgcattaagtaatccgcctggggagtacgaccgcaaggttgaaactcaaaagaattgacgggggcccgcacaagcggtg

SEQ ID NO: 144 - DNA, 628 bp, Lactobacillus buchneri
  source 1..628: mol_type = genomic DNA; note = SBI04881_16S rRNA
cgcgtctccgttgatgattttaggtgcttgcacttgaaagatttaacattgagacgagtggcgaactggtgagtaacacgtgggtaacctgcccttgaagtaggggataacacttggaaacaggtgctaataccgtataacaaccaaaaccacctggttttggtttaaaagacggcttcggctgtcactttaggatggacccgcggcgtattagcttgttggtaaggtaacggcctaccaaggcgatgatacgtagccgacctgagagggtaatcggccacattgggactgagacacggcccaaactcctacgggaggcagcagtagggaatcttccacaatggacgaaagtctgatggagcaacgccgcgtgagtgatgaagggtttcggctcgtaaaactctgttgttggagaagaacaggtgtcagagtaactgttgacatcttgacggtatccaaccagaaagccacggctaactacgtgccagcagccgcggtaatacgtaggtggcaagcgttgtccggatttattgggcgtaaagcgagcgcnncggttttttaggtctgatgtgaaagccttcggcttaaccggagaagtgcatcggaaaccgggagacttgagtgcaga

SEQ ID NO: 145 - DNA, 915 bp, Enterococcus gilvus
  source 1..915: mol_type = genomic DNA; note = SBI04884_16S rRNA
ccggagcttgctccaccgaaagaaaaggagtggcgaacgggtgagtaacacgtgggtaacctgcccatcagaaggggataacacttggaaacaggtgctaataccgtataacaatagaaaccgcatggtttctatttgaaaggcgcttttgcgtcactgatggatggacccgcggtgcattagctagttggtgaggtaacggctcaccaaggcaacgatgcatagccgacctgagagggtgatcggccacattgggactgagacacggcccaaactcctacgggaggcagcagtagggaatcttcggcaatggacgaaagtctgaccgagcaacgccgcgtgagtgaagaaggttttcggatcgtaaaactctgttgttagagaagaacaaggatgagagtaaaatgttcatcccttgacggtatctaaccagaaagccacggctaactacgtgccagcagccgcggtaatacgtaggtggcaagcgttgtccggatttattgggcgtaaagcgagcgcaggcggtttcttaagtctgatgtgaaagcccccggctcaaccggggagggtcattggaaactgggaaacttgagtgcagaagaggagagtggaattccatgtgtagcggtgaaatgcgtagatatatggaggaacaccagtggcgaaggcggctctctggtctgtaactgacgctgaggctcgaaagcgtggggagcaaacaggattagataccctggtagtccacgccgtaaacgatgagtgctaagtgttggagggtttccgcccttcagtgctgcagctaacgcattaagcactccgcctggggagtacgaccgcaaggttgaaactcaaaggaattgacgggggcccgcacaagcggtggagcatgtggtttaattcgaagcaacgcgaaga

SEQ ID NO: 146 - DNA, 860 bp, Lacticaseibacillus paracasei
  source 1..860: mol_type = genomic DNA; note = SBI04887_16S rRNA
cgagttctcgttgatgatcggtgcttgcaccgagattcaacatggaacgagtggcggacgggtgagtaacacgtgggtaacctgcccttaagtgggggataacatttggaaacagatgctaataccgcatagatccaagaaccgcatggttcttggctgaaagatggcgtaagctatcgcttttggatggacccgcggcgtattagctagttggtgaggtaatggctcaccaaggcgatgatacgtagccgaactgagaggttgatcggccacattgggactgagacacggcccaaactcctacgggaggcagcagtagggaatcttccacaatggacgcaagtctgatggagcaacgccgcgtgagtgaagaaggctttcgggtcgtaaaactctgttgttggagaagaatggtcggcagagtaactgttgtcggcgtgacggtatccaaccagaaagccacggctaactacgtgccagcagccgcggtaatacgtaggtggcaagcgttatccggatttattgggcgtaaagcgagcgcaggcggttttttaagtctgatgtgaaagccctcggcttaaccgaggaagcgcatcggaaactgggaaacttgagtgcagaagaggacagtggaactccatgtgtagcggtgaaatgcgtagatatatggaagaacaccagtggcgaaggcggctgtctggtctgtaactgacgctgaggctcgaaagcatgggtagcgaacaggattagataccctggtagtccatgccgtaaacgatgaatgctaggtgttggagggtttccgcccttcagtgccgcagctaacgcattaagcattccgcctggggagtacgaccgca

SEQ ID NO: 147 - DNA, 855 bp, Lactobacillus plantarum
  source 1..855: mol_type = genomic DNA; note = SBI04889_16S rRNA
acgaactctggtattgattggtgcttgcatcatgatttacatttgagtgagtggcgaactggtgagtaacacgtgggaaacctgcccagaagcgggggataacacctggaaacagatgctaataccgcataacaacttggaccgcatggtccgagcttgaaagatggcttcggctatcacttttggatggtcccgcggcgtattagctagatggtggggtaacggctcaccatggcaatgatacgtagccgacctgagagggtaatcggccacattgggactgagacacggcccaaactcctacgggaggcagcagtagggaatcttccacaatggacgaaagtctgatggagcaacgccgcgtgagtgaagaagggtttcggctcgtaaaactctgttgttaaagaagaacatatctgagagtaactgttcaggtattgacggtatttaaccagaaagccacggctaactacgtgccagcagccgcggtaatacgtaggtggcaagcgttgtccggatttattgggcgtaaagcgagcgcaggcggttttttaagtctgatgtgaaagccttcggctcaaccgaagaagtgcatcggaaactgggaaacttgagtgcagaagaggacagtggaactccatgtgtagcggtgaaatgcgtagatatatggaagaacaccagtggcgaaggcggctgtctggtctgtaactgacgctgaggctcgaaagtatgggtagcaaacaggattagataccctggtagtccataccgtaaacgatgaatgctaagtgttggagggtttccgcccttcagtgctgcagctaacgcattaagcattccgcctggggagtacgg

SEQ ID NO: 148 - DNA, 673 bp, Lactobacillus casei
  source 1..673: mol_type = genomic DNA; note = SBI04895_16S rRNA
gcggattggcggacgggggaggaacacgtgggtaacctgcccttaagtgggggataacatttggaaacagatgctaataccgcatagatccaagaaccgcatggttcttggctgaaagatggcgtaagctatcgcttttggatggacccgcggcgtattagctagttggtgaggtaatggctcaccaaggcgatgatacgtagccgaactgagaggttgatcggccacattgggactgagacacggcccaaactcctacgggaggcagcagtagggaatcttccacaatggacgcaagtctgatggagcaacgccgcgtgagtgaagaaggctttcgggtcgtaaaactctgttgttggagaagaatggtcggcagagtaactgttgtcggcgtgacggtatccaaccagaaagccacggctaactacgtgccagcagccgcggtaatacgtaggtggcaagcgttatccggatttattgggcgtaaagcgagcgcaggcggttttttaagtctgatgtgaaagccctcggcttaaccgaggaagcgcatcggaaactgggaaacttgagtgcagaagaggacagtggaactccatgtgtagcggtgaaatgcgtagatatatggaagaacaccagtggcgaaggcggctgtctggtctgtaactgacgctga

SEQ ID NO: 149 - DNA, 774 bp, Leuconostoc pseudomesenteroides
  source 1..774: mol_type = genomic DNA; note = SBI04900_16S rRNA
tcgaacgcacagcgaaaggtgcttgcacctttcaagtgagtggcgaacgggtgagtaacacgtggacaacctgcctcaaggctggggataacatttggaaacagatgctaataccgaataaaactcagtgtcgcatgacacaaagttaaaaggcgctttggcgtcacctagagatggatccgcggtgcattagttagttggtggggtaaaggcctaccaagacaatgatgcatagccgagttgagagactgatcggccacattgggactgagacacggcccaaactcctacgggaggctgcagtagggaatcttccacaatgggcgaaagcctgatggagcaacgccgcgtgtgtgatgaaggctttcgggtcgtaaagcactgttgtatgggaagaacagctagaatagggaatgattttagtttgacggtaccataccagaaagggacggctaaatacgtgccagcagccgcggtaatacgtatgtcccgagcgttatccggatttattgggcgtaaagcgagcgcagacggttgattaagtctgatgtgaaagcccggagctcaactccggaatggcattggaaactggttaacttgagtgcagtagaggtaagtggaactccatgtgtagcggtggaatgcgtagatatatggaagaacaccagtggcgaaggcggcttactggactgtaactgacgttgaggctcgaaagtgtgggtagcaaacaggattagataccctggtagtccacaccgtaaacgatgaacacta

SEQ ID NO: 150 - DNA, 879 bp, Pediococcus pentosaceus
  source 1..879: mol_type = genomic DNA; note = SBI04902_16S rRNA
tgcagtcgaacgaacttccgttaattgattatgacgtacttgtactgattgagattttaacacgaagtgagtggcgaacgggtgagtaacacgtgggtaacctgcccagaagtaggggataacacctggaaacagatgctaataccgtataacagagaaaaccgcatggttttcttttaaaagatggctctgctatcacttctggatggacccgcggcgtattagctagttggtgaggcaaaggctcaccaaggcagtgatacgtagccgacctgagagggtaatcggccacattgggactgagacacggcccagactcctacgggaggcagcagtagggaatcttccacaatggacgcaagtctgatggagcaacgccgcgtgagtgaagaagggtttcggctcgtaaagctctgttgttaaagaagaacgtgggtaagagtaactgtttacccagtgacggtatttaaccagaaagccacggctaactacgtgccagcagccgcggtaatacgtaggtggcaagcgttatccggatttattgggcgtaaagcgagcgcaggcggtcttttaagtctaatgtgaaagccttcggctcaaccgaagaagtgcattggaaactgggagacttgagtgcagaagaggacagtggaactccatgtgtagcggtgaaatgcgtagatatatggaagaacaccagtggcgaaggcggctgtctggtctgcaactgacgctgaggctcgaaagcatgggtagcgaacaggattagataccctggtagtccatgccgtaaacgatgattactaagtgttggagggtttccgcccttcagtgctgcagctaacgcattaagtaatccgcctggggagtacgaccgca

SEQ ID NO: 151 - DNA, 955 bp, Pediococcus ethanolidurans
  source 1..955: mol_type = genomic DNA; note = SBI04910_16S rRNA
tgcagtcgaacgcactttcgttaattgattttgagatgcttgcatcgaagatgattttaactataaagtgagtggcgaacgggtgagtaacacgtgggtaacctgcccagaagtgggggataacacctggaaacagatgctaataccgcataacaaaattaaccgcatggttgatttttaaaagatggcttcggctatcacttctggatggacccgcggcgtattagctagttggtgagataaaggctcaccaaggcagtgatacgtagccgacctgagagggtaatcggccacattgggactgagacacggcccagactcctacgggaggcagcagtagggaatcttccacaatggacgcaagtctgatggagcaacgccgcgtgagtgatgaaggctttcgggtcgtaaaactctgttgttggagaagaacgtgtgtgagagtaactgctcatgcagtgacggtatccaaccagaaagccacggctaactacgtgccagcagccgcggtaatacgtaggtggcaagcgttatccggatttattgggcgtaaagcgagcgcaggcggtcttttaagtctaatgtgaaagccttcggcttaaccgaagaagtgcattggaaactgggagacttgagtgcagaagaggagagtggaactccatgtgtagcggtgaaatgcgtagatatatggaagaacaccagtggcgaaggcggctctctggtctgcaactgacgctgaggctcgaaagcatgggtagcgaacaggattagataccctggtagtccatgccgtaaacgatgaatgctaagtgttggagggtttccgcccttcagtgctgcagctaacgcattaagcattccgcctggggagtacgaccgcanggttgaaactcaaagaattgacgggggcccgcacaagcggtggagcatgtggtttaattcgaagctacgcgaa

SEQ ID NO: 152 - DNA, 952 bp, Lactobacillus harbinensis
  source 1..952: mol_type = genomic DNA; note = SBI04913_16S rRNA
cgaggtttggtcagtttgcggtggtgcttgcatcaccaattaccgatcaaaccgagtggcggacgggtgagtaacacgtgggtaacctgcccttcagcaggggataacatttggaaacagatgctaataccgtataaccacggagaccgcatggtctccgggtaaaagatggcgcaagctatcactgaaggatggacccgcggcgtattagccagttggtggggtaacggcctaccaaagcgatgatacgtagccgacctgagagggtaatcggccacattgggactgagacacggcccaaactcctacgggaggcagcagtagggaatcttccacaatggacgcaagtctgatggagcaacgccgcgtgagtgaagaaggctttcgggtcgtaaaactctgttattgaagaagaacgtgtgtgacagtaactggtcatgcagtgacggtattcaatcagaaagtcacggctaactacgtgccagcagccgcggtaatacgtaggtggcaagcgttgtccggatttattgggcgtaaagcgagtgcaggcggtcttttaagtctgatgtgaaagccttcggcttaaccgaagaagggcatcggaaactgggagacttgagtgcagaagaggagagtggaactccatgtgtagcggtgaaatgcgtagatatatggaagaacaccagtggcgaaggcggctctctggtctgtaactgacgctgaggctcgaaagcgtgggtagcaaacaggattagataccctggtagtccacgccgtaaacgatgaatactaagtgttggagggtttccgcccttcagtgctgcagctaacgcattaagtattccgcctggggagtacgaccgcaaggttgaaactcaaaggaattgacgggggcccgcacaagcggtggagcatgtggtttaattcgaagcaacgcgaagaaccttaccag

SEQ ID NO: 153 - DNA, 924 bp, Lactococcus lactis
  source 1..924: mol_type = genomic DNA; note = SBI04916_16S rRNA
tgcagttgagcgctgaaggttggtacttgtaccgactggatgagcagcgaacgggtgagtaacgcgtggggaatctgcctttgagcgggggacaacatttggaaacgaatgctaataccgcataaaaactttaaacacaagttttaagtttgaaagatgcaattgcatcactcaaagatgatcccgcgttgtattagctagttggtgaggtaaaggctcaccaaggcgatgatacatagccgacctgagagggtgatcggccacattgggactgagacacggcccaaactcctacgggaggcagcagtagggaatcttcggcaatggacgaaagtctgaccgagcaacgccgcgtgagtgaagaaggttttcggatcgtaaaactctgttggtagagaagaacgttgatgagagtggaaagctcatcaagtgacggtaactacccagaaagggacggctaactacgtgccagcagccgcggtaatacgtaggtcccgagcgttgtccggatttattgggcgtaaagcgagcgcaggtggtttattaagtctggtgtaaaaggcagtggctcaaccattgtatgcattggaaactggtagacttgagtgcaggagaggagagtggaattccatgtgtagcggtgaaatgcgtagatatatggaggaacaccggtggcgaaagcggctctctggcctgtaactgacactgaggctcgaaagcgtggggagcaaacaggattagataccctggtagtccacgccgtaaacgatgagtgctagatgtagggagctataagttctctgtatcgcagctaacgcaataagcactccgcctggggagtacgaccgcaaggttgaaactcaaaggaattgacgggggcccgcacaagcggtggagcatgtggtttaattcgaagcaacgcga

SEQ ID NO: 154 - DNA, 934 bp, Lactococcus lactis
  source 1..934: mol_type = genomic DNA; note = SBI04918_16S rRNA
tgcagttgagcgctgaaggttggtacttgtaccaactggatgagcagcgaacgggtgagtaacgcgtggggaatctgcctttgagcgggggacaacatttggaaacgaatgctaataccgcataaaaactttaaacacaagttttaagtttgaaagatgcaattgcatcactcaaagatgatcccgcgttgtattagctagttggtgaggtaaaggctcaccaaggcgatgatacatagccgacctgagagggtgatcggccacattgggactgagacacggcccaaactcctacgggaggcagcagtagggaatcttcggcaatggacgaaagtctgaccgagcaacgccgcgtgagtgaagaaggttttcggatcgtaaaactctgttggtagagaagaacgttggtgagagtggaaagctcatcaagtgacggtaactacccagaaagggacggctaactacgtgccagcagccgcggtaatacgtaggtcccgagcgttgtccggatttattgggcgtaaagcgagcgcaggtggtttattaagtctggtgtaaaaggcagtggctcaaccattgtatgcattggaaactggtagacttgagtgcaggagaggagagtggaattccatgtgtagcggtgaaatgcgtagatatatggaggaacaccggtggcgaaagcggctctctggcctgtaactgacactgaggctcgaaagcgtggggagcaaacaggattagataccctggtagtccacgccgtaaacgatgagtgctagatgtagggagctataagttctctgtatcgcagctaacgcaataagcactccgcctggggagtacgaccgcaaggttgaaactcaaaggaattgacgggggcccgcacaagcggtggagcatgtggtttaattcgaagcaacgcgaagaaccttac

SEQ ID NO: 155 - DNA, 680 bp, Pediococcus parvulus
  source 1..680: mol_type = genomic DNA; note = SBI04919_16S rRNA
tgcagtcgaacgcactttcgttgaatgaattagaggtgcttgcaccgaagatgattttagctataaagtgagtggcgaacgggtgagtaacacgtgggtaacctgcccagaagtgggggataacacctggaaacagatgctaataccgcataacaaagtaaaccgcatggtttacttttaaaagatggcttcggctatcacttctggatggacccgcggcgtattagctagttggtgagataaaggctcaccaaggcagtgatacgtagccgacctgagagggtaatcggccacattgggactgagacacggcccagactcctacgggaggcagcagtagggaatcttccacaatggacgaaagtctgatggagcaacgccgcgtgagtgatgaaggctttagggtcgtaaaactctgttgttggagaagaacgtgtgtgagagtaactgctcatgcagtgacggtatccaaccagaaagccacggctaactacgtgccagcagccgcggtaatacgtaggtggcaagcgttatccggatttattgggcgtaaagcgagcgcaggcggtcttttaagtctaatgtgaaagccttcggcttaaccgaagaagtgcattggaaactggaagacttgagtgcagaagaggacagtggaactccatgtgtagcggtgaaatgcg

SEQ ID NO: 156 - DNA, 932 bp, Galactomyces geotrichum
  source 1..932: mol_type = genomic DNA; note = SBI04932_ITS sequence
tttgtgaatttcaacaaacaacatcaattttatagtctattatttttaattaaaacttttaacaatggatctcttggttctcgtatcgatgaagaacgcagcgaaacgcgatatttcttgtgaattgcagaagtgaatcatcagtttttgaacgcacattgcactttggggtatcccccaaagtatacttgtttgagcgttgtttctctcttggaattgctttgctcttctaaaatttcgaatcaaattcgtttgaaaaacaacactattcaacctcagatcaagtaggattacccgctgaacttaagcatatcaataagcggaggaaaagaaaccaacagggattgccttagtaacggcgagtgaagcggcaaaagctcaaatttgaaatcggcccccaggtcgagttgtaatttgtagattgtatcttgagagcggattaaagtctgttggaacacagcgccttagagggtgacagccccgtaaaatctattctcattgtaagatactttcgaagagtcgagttgtttgggaatgcagctctaagtgggaggtaaattccttctaaagctaaatattgacgagagaccgatagcgaacaagtactgtgaaggaaagatgaaaagcactttgaaaagagagtgaaaaagtacgtgaaattgttaaaagggaagggtattgaatcagacttggtgctgttgttcaactgtactcagcagtactaggccaaggtggggtgtttgggagtgaaaaagaagtaggaacgtaactcttcggagtgttatagcctactttcatagctcctcctgcgcttcggcaaggaccttgtaatgattctataccgcccgtcttgaaacacggaccaaggagtctaacgtctatgcggtttgggtgtaaaacccgtacgcgtaaagtactatcgactttccggg

SEQ ID NO: 157 - DNA, 869 bp, Lactobacillus plantarum
  source 1..869: mol_type = genomic DNA; note = SBI05399_16S rRNA
tgcagtcgaacgaactctggtattgattggtgcttgcatcatgatttacatttgagtgagtggcgaactggtgagtaacacgtgggaaacctgcccagaagcgggggataacacctggaaacagatgctaataccgcataacaacttggaccgcatggtccgagtttgaaagatggcttcggctatcacttttggatggtcccgcggcgtattagctagatggtggggtaacggctcaccatggcaatgatacgtagccgacctgagagggtaatcggccacattgggactgagacacggcccaaactcctacgggaggcagcagtagggaatcttccacaatggacgaaagtctgatggagcaacgccgcgtgagtgaagaagggtttcggctcgtaaaactctgttgttaaagaagaacatatctgagagtaactgttcaggtattgacggtatttaaccagaaagccacggctaactacgtgccagcagccgcggtaatacgtaggtggcaagcgttgtccggatttattgggcgtaaagcgagcgcaggcggttttttaagtctgatgtgaaagccttcggctcaaccgaagaagtgcatcggaaactgggaaacttgagtgcagaagaggacagtggaactccatgtgtagcggtgaaatgcgtagatatatggaagaacaccagtggcgaaggcggctgtctggtctgtaactgacgctgaggctcgaaagtatgggtagcaaacaggattagataccctggtagtccataccgtaaacgatgaatgctaagtgttggagggtttccgcccttcagtgctgcagctaacgcattaagcattccgcctggggagtacggccgca

SEQ ID NO: 158 - DNA, 980 bp, Kazachstania servazzii
  source 1..980: mol_type = genomic DNA; note = SBI05419_ITS sequence
tttttcgttgctttgcgaggagacactatactgctggaccagcgcttaattgcgcggtttggtgggtctctgtagctcagtagcactattacacacagtggagatttttataattctttgcatgcttctttgggctgcttcggcggcccaggagtgacaaacacaaacaattttgtaattttatgaactagtcaaaaccagaattccaggaagatttatctttttgtaatattaaaacaaatattaaaactttcaacaacggatctcttggttctcgcatcgatgaagaacgcagcgaaatgcgatacgtaatgtgaattgcagaattccgtgaatcatcgaatctttgaacgcacattgcgccctctggtattccagggggcatgcctgtttgagcgtcatttccttctcaaacagcaatgtttggttgtgagtgatactctttcggagttagcttgaaattgctggccgatggctgttgtggttgagtgtctcccttcggggagagcgcttgctgcgttaagggacgtcctgctggacatcttcgtattaggttctaccaacttcgaagacggttagcggggagttctgcagtgagtgtagtgcttttactacgttgcaccatggcgaacagtgttcttttaagtttgacctcaaatcaggtaggattacccgctgaacttaagcatatcaataagcggaggaaaagaaaccaaccgggattgccttagtaacggcgagtgaagcggcaaaagctcaaatttgaaatctagtaccttcggtgctcgagttgtaatttgtagagggatactttggggccgttccttgtctatgttccttggaacaggacgtcatagagggtgagaatcccgtgtggcgaggagtgcggttctatgtaaagtgccttcgaagagtcgagttgtttgggaatgcagctctaagtggggtggtaaattccatctaaagctaaatattggcga

SEQ ID NO: 159 - DNA, 779 bp, Kluyveromyces marxianus
  source 1..779: mol_type = genomic DNA; note = SBI05449_ITS sequence
gatgatagattactgggggatcgtctgaacaaggcctgcgcttaattgcgcggccagttcttgattctctgctatcagttttctatttctcatcctaaacacaatggagttttttctctatgaactacttccctggagagctcgtctctccagtggacataaacacaaacaatattttgtattatgaaaaactattatactataaaatttaatattcaaaactttcaacaacggatctcttggttctcgcatcgatgaagaacgcagcgaattgcgatatgtattgtgaattgcagattttcgtgaatcatcaaatctttgaacgcacattgcgccctctggtattccagggggcatgcctgtttgagcgtcatttctctctcaaacctttgggtttggtagtgagtgatactcgtctcgggttaacttgaaagtggctagccgttgccatctgcgtgagcagggctgcgtgtcaagtctatggactcgactcttgcacatctacgtcttaggtttgcgccaattcgtggtaagcttgggtcatagagactcataggtgttataaagactcgctggtgtttgtctccttgaggcatacggctttaaccaaaactctcaaagtttgacctcaaatcaggtaggagtacccgctgaacttaagcatatcaataagcggaggaaaagaaaccaaccgggattgccttagtaacggcgagtgaagcggcaaaagctcaaatttgaaatctggcgtcttcgacgtccgagttgtaatttgaaga

SEQ ID NO: 160 - DNA, 762 bp, Nakazawaea ishiwadae
  source 1..762: mol_type = genomic DNA; note = SBI05469_ITS sequence
gcgcttgattgcgcggtggtaaaccttacacactttgtttttattattaaagacaccattgctttggtgatggggggtaaaatccacatcgccagaggttttaacaaaaacacttatttttaaaggtaactttttaaattgtcaataaataatttgtctgattaatttcaggtaatacaaatatttaaaactttcaacaacggatctcttggttctcgcatcgatgaagaacgcagcgaattgcgataagtattgtgaattgcagaatttcgtgaatcatcgaatctttgaacgcacattgcaccctgtggtattccacagggtatgcctgtttgagcgtcatttctctctcaaaactctaagttttggtgttgagtgatactcgggttttaagcttgagtttgcttgaaaagtattggcaagggaagtaattcttgtgagagctatttattcaatgtattaggtttatccaactcgttgattgatagaaggagcagtagttgctaataggcccggccttacaacaaacaaaccaaagtttgacctcaaatcaggtaggattacccgctgaacttaagcatatcaataagcggaggaaaagaaaccaacagggattgccttagtaacggcgagtgaagcggcaaaagctcaaatttgaaatctagcactttcagtgttcgagttgtaatttgaagaaggtatctttggagttggcccctgtctatgttccttggaacaggacgtcacagagggtgagaatcc

SEQ ID NO: 161 - DNA, 570 bp, Saccharomyces cerevisiae
  source 1..570: mol_type = genomic DNA; note = SBI05473_ITS sequence
agatggagagtccagccgggcctgcgcttaagtgcgcggtcttgctaggcttgtaagtttctttcttgctattccaaacggtgagagatttctgtgcttttgttataggacaattaaaaccgtttcaatacaacacactgtggagttttcatatctttgcaactttttctttgggcattcgagcaatcggggcccagaggtaacaaacacaaacaattttatctattcattaaatttttgtcaaaaacaagaattttcgtaactggaaattttaaaatattaaaaactttcaacaacggatctcttggttctcgcatcgatgaagaacgcagcgaaatgcgatacgtaatgtgaattgcagaattccgtgaatcatcgaatctttgaacgcacattgcgccccttggtattccagggggcatgcctgtttgagcgtcatttccttctcaaacattctgtttggtagtgagtgatactctttggagttaacttgaaattgctggccttttcattggatgttttttttccaaagagaggtttctctgcgtgcttgaggtataatgcaagtac

SEQ ID NO: 162 - DNA, 852 bp, Streptococcus thermophilus
  source 1..852: mol_type = genomic DNA; note = SBI05579_16S rRNA
tgcaagtagaacgctgaagagaggagcttgctcttcttggatgagttgcgaacgggtgagtaacgcgtaggtaacctgccttgtagcgggggataactattggaaacgatagctaataccgcataacaatggatgacacatgtcatttatttgaaaggggcaattgctccactacaagatggacctgcgttgtattagctagtaggtgaggtaatggctcacctaggcgacgatacatagccgacctgagagggtgatcggccacactgggactgagacacggcccagactcctacgggaggcagcagtagggaatcttcggcaatgggggcaaccctgaccgagcaacgccgcgtgagtgaagaaggttttcggatcgtaaagctctgttgtaagtcaagaacgggtgtgagagtggaaagttcacactgtgacggtagcttaccagaaagggacggctaactacgtgccagcagccgcggtaatacgtaggtcccgagcgttgtccggatttattgggcgtaaagcgagcgcaggcggtttgataagtctgaagttaaaggctgtggctcaaccatagttcgctttggaaactgtcaaacttgagtgcagaaggggagagtggaattccatgtgtagcggtgaaatgcgtagatatatggaggaacaccggtggcgaaagcggctctctggtctgtaactgacgctgaggctcgaaagcgtggggagcgaacaggattagataccctggtagtccacgccgtaaacgatgagtgctaggtgttggatcctttccgggattcagtgccgaagctaacgcattaagcactccgcctggggagtacgaccgca

SEQ ID NO: 163 - DNA, 516 bp, Lactobacillus plantarum
  source 1..516: mol_type = genomic DNA; note = SBI05697_16S rRNA
gctatcacttttggatggtcccgcggcgtattagctagatggtgaggtaacggctcaccatggcaatgatacgtagccgacctgagagggtaatcggccacattgggactgagacacggcccaaactcctacgggaggcagcagtagggaatcttccacaatggacgaaagtctgatggagcaacgccgcgtgagtgaagaagggtttcggctcgtaaaactctgttgttaaagaagaacatatctgagagtaactgttcaggtattgacggtatttaaccagaaagccacggctaactacgtgccagcagccgcggtaatacgtaggtggcaagcgttgtccggatttattgggcgtaaagcgagcgcaggcggttttttaagtctgatgtgaaagccttcggctcaaccgaagaagtgcatcggaaactgggaaacttgagtgcagaagaggacagtggaactccatgtgtagcggtgaaatgcgtagatatatggaagaacaccagtggcgaa

SEQ ID NO: 164 - DNA, 899 bp, Pichia terricola
  source 1..899: mol_type = genomic DNA; note = SBS00208_ITS sequence
ctgcgtgcgcgtaacaaacccctaaacatgaataacctagtcaagaatccataagaataaaactttcaacaacggatctcttggttctcgcatcgatgaagagcgcagcgaaatgcgatacctagtgtgaattgcagccatcgtgaatcatcgagttcttgaacgcacattgcgccccctggtattccggggggcatgcctgtttgagcgtcgtttctatctcacgcaagtggagctggcccggccttggccccgccgaaaagaaacgagggcgaagcgaactatgttgtgcgccgaccccagctatcaagctcgacctcaaatcaggtaggaatacccgctgaacttaagcatatcaataagcggaggaaaagaaaccaacagggattgcctcagtagcggcgagtgaagcggcaagagctcagatttgaaatcgcctcggcgagttgtaaattgcaggttggagtctttgtggcggcgtgtgtctaagtcccttggaacagggcgccattgagggtgagagccccgtgcggcacgcgtccaagctttaagacccttctgacgagtcgagttgtttgggaatgcagctctaagtgggtggtaaattccatctaaggctaaatactggcgagagaccgatagcgaacaagtactgtgaaggaaagatgaaaagcactttgaaaagagagtgaaacagcacgtgaaattgttgaaagggaagggtattgggctcgacatggggactgcgcaccgttgcttcttgtaggcggcgctctgtgcggtttctgggccagcatcagtttttgccgcgggagaatggggggaggaacgtggctcttcggagtgttatagcctctctcagatgccgcgagcggggactgaggtctgcgattcgttca

SEQ ID NO: 165 - DNA, 848 bp, Clavispora sp.
  source 1..848: mol_type = genomic DNA; note = SBI00225_ITS sequence
tacgatatctaaacaaaatcaattttttttcttcaatacaacaaaaaaatcaaaactttcaacaacggatctcttggttctcgcatcgatgaagaacgcagcgaattgcgatacgtagtatgacttgcagacgtgaatcatcgaatctttgaacgcacattgcgcctcgaggtattcctcgaggcatgcctgtttgagcgtcggccccccctctaacccccgggttaggtgttgacacgaaattccaagcgcaatcaatctcatgtttttgatgacgcccacccatttcgccctcaaatcaggtaggactacccgctgaacttaagcatatcaataagcggaggaaaagaaaccaacagggattgcctcagtaacggcgagtgaagcggcaaaagctcaaatttgaaatcccgcgggagttgtaatttgaaggtttcgggttctgaggctgtgcgcgcccaagtccattggaacatggcgcctgggagggtgagagccccgtccggcgctgcgcagtctttttttgcgacccgtttccgacgagtcgagttgtttgggaatgcagctcaaagtgggtggtaaattccatctaaagctaaatattggcgagagaccgatagcgaacaagtacagtgatggaaagatgaaaagcactttgaaaagagagtgaaacagtacgtgaaattgttgaaagggaagggcttgcaagcagacacggtttcggccgggccagcatcggtttgccggggcggacaatgcggcgggaatgtggcgcgtctccttgtggggcgcgtgtttatagcccggcgtgatacgcccatggtagaccgaggcctgcgatctaatct

SEQ ID NO: 166 - DNA, 936 bp, Bacillus atrophaeus
  source 1..936: mol_type = genomic DNA; note = SBI00550_16S rRNA
tgcagtcgagcggacagatgggagcttgctccctgatgttagcggcggacgggtgagtaacacgtgggtaacctgcctgtaagactgggataactccgggaaaccggggctaataccggatgcttgtttgaaccgcatggttcaaacataaaaggtggcttcggctaccacttacagatggacccgcggcgcattagctagttggtgaggtaatggctcaccaaggcaacgatgcgtagccgacctgagagggtgatcggccacactgggactgagacacggcccagactcctacgggaggcagcagtagggaatcttccgcaatggacgaaagtctgacggagcaacgccgcgtgagtgatgaaggttttcggatcgtaaagctctgttgttagggaagaacaagtgccgttcaaatagggcggcaccttgacggtacctaaccagaaagccacggctaactacgtgccagcagccgcggtaatacgtaggtggcaagcgttgtccggaattattgggcgtaaagggctcgcaggcggtttcttaagtctgatgtgaaagcccccggctcaaccggggagggtcattggaaactggggaacttgagtgcagaagaggagagtggaattccacgtgtagcggtgaaatgcgtagagatgtggaggaacaccagtggcgaaggcgactctctggtctgtaactgacgctgaggagcgaaagcgtggggagcgaacaggattagataccctggtagtccacgccgtaaacgatgagtgctaagtgttagggggtttccgccccttagtgctgcagctaacgcattaagcactccgcctggggagtacggtcgcaagactgaaactcaaaggaattgacgggggcccgcacaagcggtggagcatgtggtttaattcgaagcaacgcgaagaaccttac

SEQ ID NO: 167 - DNA, 938 bp, Bacillus subtilis
  source 1..938: mol_type = genomic DNA; note = SBI00564_16S rRNA
tgcaagtcgagcggacagatgggagcttgctccctgatgttagcggcggacgggtgagtaacacgtgggtaacctgcctgtaagactgggataactccgggaaaccggggctaataccggatggttgtttgaaccgcatggttcaaacataaaaggtggcttcggctaccacttacagatggacccgcggcgcattagctagttggtgaggtaacggctcaccaaggcaacgatgcgtagccgacctgagagggtgatcggccacactgggactgagacacggcccagactcctacgggaggcagcagtagggaatcttccgcaatggacgaaagtctgacggagcaacgccgcgtgagtgatgaaggttttcggatcgtaaagctctgttgttagggaagaacaagtaccgttcgaatagggcggtaccttgacggtacctaaccagaaagccacggctaactacgtgccagcagccgcggtaatacgtaggtggcaagcgttgtccggaattattgggcgtaaagggctcgcaggcggtttcttaagtctgatgtgaaagcccccggctcaaccggggagggtcattggaaactggggaacttgagtgcagaagaggagagtggaattccacgtgtagcggtgaaatgcgtagagatgtggaggaacaccagtggcgaaggcgactctctggtctgtaactgacgctgaggagcgaaagcgtggggagcgaacaggattagataccctggtagtccacgccgtaaacgatgagtgctaagtgttagggggtttccgccccttagtgctgcagctaacgcattaagcactccgcctggggagtacggtcgcaagactgaaactcaaaggaattgacgggggcccgcacaagcggtggagcatgtggtttaattcgaagcaacgcgaagaaccttacc

SEQ ID NO: 168 - DNA, 1000 bp, Pichia fermentans
  source 1..1000: mol_type = genomic DNA; note = SBI00817_ITS sequence
cacactgcgtgggcgacacgaaacaccgaaaccgaacgcacgccgtcaagcaagaaatccacaaaactttcaacaacggatctcttggttctcgcatcgatgaagagcgcagcgaaatgcgatacctagtgtgaattgcagccatcgtgaatcatcgagttcttgaacgcacattgcgcccgctggtattccggcgggcatgcctgtctgagcgtcgtttccttcttggagcggagcttcagacctggcgggctgtctttcgggacggcgcgcccaaagcgaggggccttctgcgcgaactagactgtgcgcgcggggcggccggcgaacttataccaagctcgacctcagatcaggcaggagtacccgctgaacttaagcatatcaataagcggaggaaaagaaaccaacagggattgccccagtagcggcgagtgaagcggcaaaagctcagatttggaatcgcttcggcgagttgtgaattgcaggttggcgcctctgcggcggcggcggtccaagtcccttggaacagggcgccattgagggtgagagccccgtgggaccgtttgcctatgctctgaggcccttctgacgagtcgagttgtttgggaatgcagctctaagcgggtggtaaattccatctaaggctaaatactggcgagagaccgatagcgaacaagtactgtgaaggaaagatgaaaagcactttgaaaagagagtgaaacagcacgtgaaattgttgaaagggaagggtattgcgcccgacatggagcgtgcgcaccgctgcccctcgtgggcggcgctctgggcgtgctctgggccagcatcggtttttgccgcgggagaanggcggcgggcatgtagctcttcngagtgttatagcctgccgccggcgccgcgagcggggaccgaggactgcgacttttgtctcggatgctggcacaacggcgcaacaccgcccgtcttgaaacatggaccaaggagtctaacgtctatgcga

SEQ ID NO: 169 - DNA, 1219 bp, Lactobacillus casei; identical to SEQ ID NO: 96
  source 1..1219: mol_type = genomic DNA; note = SBI04256_16S rRNA

SEQ ID NO: 170 - DNA, 619 bp, Weissella cibaria; identical to SEQ ID NO: 99
  source 1..619: mol_type = genomic DNA; note = SBI04259_16S rRNA

SEQ ID NO: 171 - DNA, 969 bp, Debaryomyces hansenii
  source 1..969: mol_type = genomic DNA; note = SBS00319_ITS sequence
aacttttgctttggtctggactagaaatagtttgggccagaggttactaaactaaacttcaatatttatattgaattgttatttatttaattgtcaatttgttgattaaattcaaaaaatcttcaaaactttcaacaacggatctcttggttctcgcatcgatgaagaacgcagcgaaatgcgataagtaatatgaattgcagattttcgtgaatcatcgaatctttgaacgcacattgcgccctctggtattccagagggcatgcctgtttgagcgtcatttctctctcaaaccttcgggtttggtattgagtgatactcttagtcgaactaggcgtttgcttgaaatgtattggcatgagtggtactggatagtgctatatgactttcaatgtattaggtttatccaactcgttgaatagtttaatggtatatttctcggtattctaggctcggccttacaatataacaaacaagtttgacctcaaatcaggtaggattacccgctgaacttaagcatatcaataagcggaggaaaagaaaccaacagggattgccttagtaacggcgagtgaagcggcaaaagctcaaatttgaaatctggcaccttcggtgtccgagttgtaatttgaagaaggtaactttggagttggctcttgtctatgttccttggaacaggacgtcacagagggtgagaatcccgtgcgatgagatgcccaattctatgtaaagtgctttcgaagagtcgagttgtttgggaatgcagctctaagtgggtggtaaattccatctaaagctaaatattggcgagagaccgatagcgaacaagtacagtgatggaaagatgaaaagaactttgaaaagagagtgaaaaagtacgtgaaattgttgaaagggaaagggcttgagatcagacttggtattttgcgatcctttccttcttggttgggttcctcgcagcttactggg

SEQ ID NO: 172 - DNA, 890 bp, Pediococcus pentosaceus
  source 1..890: mol_type = genomic DNA; note = SBS02335_16S rRNA
aacttccgttaattgattatgacgtacttgtactgattgagattttaacacgaagtgagtggcgaacgggtgagtaacacgtgggtaacctgcccagaagtaggggataacacctggaaacagatgctaataccgtataacagagaaaaccgcatggttttcttttaaaagatggctctgctatcacttctggatggacccgcggcgtattagctagttggtgaggcaaaggctcaccaaggcagtgatacgtagccgacctgagagggtaatcggccacattgggactgagacacggcccagactcctacgggaggcagcagtagggaatcttccacaatggacgcaagtctgatggagcaacgccgcgtgagtgaagaagggtttcggctcgtaaagctctgttgttaaagaagaacgtgggtaagagtaactgtttacccagtgacggtatttaaccagaaagccacggctaactacgtgccagcagccgcggtaatacgtaggtggcaagcgttatccggatttattgggcgtaaagcgagcgcaggcggtcttttaagtctaatgtgaaagccttcggctcaaccgaagaagtgcattggaaactgggagacttgagtgcagaagaggacagtggaactccatgtgtagcggtgaaatgcgtagatatatggaagaacaccagtggcgaaggcggctgtctggtctgcaactgacgctgaggctcgaaagcatgggtagcgaacaggattagataccctggtagtccatgccgtaaacgatgattactaagtgttggagggtttccgcccttcagtgctgcagctaacgcattaagtaatccgcctggggagtacgaccgcaaggttgaaactcaaaagaattga

SEQ ID NO: 173 - DNA, 969 bp, Lactobacillus brevis
  source 1..969: mol_type = genomic DNA; note = SBS04254_16S rRNA
agcttccgttgaatgacgtgcttgcactgatttcaacaatgaagcgagtggcgaactggtgagtaacacgtggggaatctgcccagaagcaggggataacacttggaaacaggtgctaataccgtataacaacaaaatccgcatggattttgtttgaaaggtggcttcggctatcacttctggatgatcccgcggcgtattagttagttggtgaggtaaaggcccaccaagacgatgatacgtagccgacctgagagggtaatcggccacattgggactgagacacggcccaaactcctacgggaggcagcagtagggaatcttccacaatggacgaaagtctgatggagcaatgccgcgtgagtgaagaagggtttcggctcgtaaaactctgttgttaaagaagaacacctttgagagtaactgttcaagggttgacggtatttaaccagaaagccacggctaactacgtgccagcagccgcggtaatacgtaggtggcaagcgttgtccggatttattgggcgtaaagcgagcgcaggcggttttttaagtctgatgtgaaagccttcggcttaaccggagaagtgcatcggaaactgggagacttgagtgcagaagaggacagtggaactccatgtgtagcggtggaatgcgtagatatatggaagaacaccagtggcgaaggcggctgtctagtctgtaactgacgctgaggctcgaaagcatgggtagcgaacaggattagataccctggtagtccatgccgtaaacgatgagtgctaagtgttggagggtttccgcccttcagtgctgcagctaacgcattaagcactccgcctggggagtacgaccgcaaggttgaaactcaaaggaattgacgggggcccgcacaagcggtggagcatgtggtttaattcgaagctacgcgaagaaccttaccaggtcttgacatcttctgccaatctta

SEQ ID NO: 174 - DNA, 937 bp, Leuconostoc mesenteroides
  source 1..937: mol_type = genomic DNA; note = SBS04255_16S rRNA
tgcagtcgaacgcacagcgaaaggtgcttgcacctttcaagtgagtggcgaacgggtgagtaacacgtggacaacctgcctcaaggctggggataacatttggaaacagatgctaataccgaataaaacttagtgtcgcatgacaaaaagttaaaaggcgcttcggcgtcacctagagatggatccgcggtgcattagttagttggtggggtaaaggcctaccaagacaatgatgcatagccgagttgagagactgatcggccacattgggactgagacacggcccaaactcctacgggaggctgcagtagggaatcttccacaatgggcgaaagcctgatggagcaacgccgcgtgtgtgatgaaggctttcgggtcgtaaagcactgttgtatgggaagaacagctagaataggaaatgattttagtttgacggtaccataccagaaagggacggctaaatacgtgccagcagccgcggtaatacgtatgtcccgagcgttatccggatttattgggcgtaaagcgagcgcagacggtttattaagtctgatgtgaaagcccggagctcaactccggaatggcattggaaactggttaacttgagtgcagtagaggtaagtggaactccatgtgtagcggtggaatgcgtagatatatggaagaacaccagtggcgaaggcggcttactggactgcaactgacgttgaggctcgaaagtgtgggtagcaaacaggattagataccctggtagtccacaccgtaaacgatgaacactangtgttaggaggtttccgcctcttagtgccgaagctaacgcattaagtgttccgcctggggagtacgaccgcaaggttgaaactcaaaggaattgacggggacccgcacaagcggtggagcatgtggtttaattcgaagcaacgcgaagaaccttacc

SEQ ID NO: 175 - DNA, 948 bp, Lactobacillus plantarum
  source 1..948: mol_type = genomic DNA; note = SBS04260_16S rRNA
atacntgcagtcgaacgaactctggtattgattggtgcttgcatcatgatttacatttgagtgagtggcgaactggtgagtaacacgtgggaaacctgcccagaagcgggggataacacctggaaacagatgctaataccgcataacaacttggaccgcatggtccgagcttgaaagatggcttcggctatcacttttggatggtcccgcggcgtattagctagatggtggggtaacggctcaccatggcaatgatacgtagccgacctgagagggtaatcggccacattgggactgagacacggcccaaactcctacgggaggcagcagtagggaatcttccacaatggacgaaagtctgatggagcaacgccgcgtgagtgaagaagggtttcggctcgtaaaactctgttgttaaagaagaacatatctgagagtaactgttcaggtattgacggtatttaaccagaaagccacggctaactacgtgccagcagccgcggtaatacgtaggtggcaagcgttgtccggatttattgggcgtaaagcgagcgcaggcggttttttaagtctgatgtgaaagccttcggctcaaccgaagaagtgcatcggaaactgggaaacttgagtgcagaagaggacagtggaactccatgtgtagcggtgaaatgcgtagatatatggaagaacaccagtggcgaaggcggctgtctggtctgtaactgacgctgaggctcgaaagtatgggtagcaaacaggattagataccctggtagtccataccgtaaacgatgaatgctaagtgttggagggtttccgcccttcagtgctgcagctaacgcattaagcattccgcctggggagtacggccgcaaggctgaaactcaaaggaattgacgggggcccgcacaagcggtggagcatgtggtttaattcgaagctacgcga

SEQ ID NO: 176 - DNA, 1034 bp, Pichia kudriavzevii
  source 1..1034: mol_type = genomic DNA; note = SBS04263_ITS sequence
ctgcgtgagcggaacgaaaacaacaacacctaaaatgtggaatatagcatatagtcgacaagagaaatctacgaaaaacaaacaaaactttcaacaacggatctcttggttctcgcatcgatgaagagcgcagcgaaatgcgatacctagtgtgaattgcagccatcgtgaatcatcgagttcttgaacgcacattgcgcccctcggcattccggggggcatgcctgtttgagcgtcgtttccatcttgcgcgtgcgcagagttgggggagcggagcggacgacgtgtaaagagcgtcggagctgcgactcgcctgaaagggagcgaagctggccgagcgaactagactttttttcagggacgcttggcggccgagagcgagtgttgcgagacaacaaaaagctcgacctcaaatcaggtaggaatacccgctgaacttaagcatatcaataagcggaggaaaagaaaccaacagggattgcctcagtagcggcgagtgaagcggcaagagctcagatttgaaatcgtgctttgcggcacgagttgtagattgcaggttggagtctgtgtggaaggcggtgtccaagtcccttggaacagggcgcccaggagggtgagagccccgtgggatgccggcggaagcagtgaggcccttctgacgagtcgagttgtttgggaatgcagctccaagcgggtggtaaattccatctaaggctaaatactggcgagagaccgatagcgaacaagtactgtgaaggaaagatgaaaagcactttgaaaagagagtgaaacagcacgtgaaattgttgaaagggaagggtattgcgcccgacatggggattgcgcaccgctgcctctcgtgggcggcgctctgggctttccctgggccagcatcggttcttgctgcaggaganggggttctggaacgtggctcttcgnagtgntatagccnggccagatgctgcgtgcggggaccgannctgcggccgtgtnntcacggatgctggnagacggcgcacaccgcccgtcttgaa

SEQ ID NO: 177 - DNA, 899 bp, Weizmannia coagulans
  source 1..899: mol_type = genomic DNA; note = CS00020_16S rRNA
gcttgcttttaaaaggttagcggcggacgggtgagtaacacgtgggcaacctgcctgtaagatcgggataacgccgggaaaccggggctaataccggatagttttttcctccgcatggaggaaaaaggaaagacggcttctgctgtcacttacagatgggcccgcggcgcattagctagttggtggggtaacggctcaccaaggcaacgatgcgtagccgacctgagagggtgatcggccacattgggactgagacacggcccaaactcctacgggaggcagcagtagggaatcttccgcaatggacgaaagtctgacggagcaacgccgcgtgagtgaagaaggccttcgggtcgtaaaactctgttgccggggaagaacaagtgccgttcgaacagggcggcgccttgacggtacccggccagaaagccacggctaactacgtgccagcagccgcggtaatacgtaggtggcaagcgttgtccggaattattgggcgtaaagcgcgcgcaggcggcttcttaagtctgatgtgaaatcttgcggctcaaccgcaagcggtcattggaaactgggaggcttgagtgcagaagaggagagtggaattccacgtgtagcggtgaaatgcgtagagatgtggaggaacaccagtggcgaangcggctctctggtctgtaactgacgctgaggcgcgaaagcgtggggagcaaacaggattagataccctggtagtccacgccgtaaacgatgagtgctaagtgttagagggtttccgccctttagtgctgcagctaacgcattaagcactccgcctggggagtacggccgcaaggctgaaactcaaaggaattgannggggcccgcacaagcggtggagcatgtggtttaattcgaagcaa

SEQ ID NO: 178 - DNA, 884 bp, Lacticaseibacillus rhamnosus
  source 1..884: mol_type = genomic DNA; note = CS00010_16S rRNA
aacgagttctgattattgaaaggtgcttgcatcttgatttaattttgaacgagtggcggacgggtgagtaacacgtgggtaacctgcccttaagtgggggataacatttggaaacagatgctaataccgcataaatccaagaaccgcatggttcttggctgaaagatggcgtaagctatcgcttttggatggacccgcggcgtattagctagttggtgaggtaacggctcaccaaggcaatgatacgtagccgaactgagaggttgatcggccacattgggactgagacacggcccaaactcctacgggaggcagcagtagggaatcttccacaatggacgcaagtctgatggagcaacgccgcgtgagtgaagaaggctttcgggtcgtaaaactctgttgttggagaagaatggtcggcagagtaactgttgtcggcgtgacggtatccaaccagaaagccacggctaactacgtgccagcagccgcggtaatacgtaggtggcaagcgttatccggatttattgggcgtaaagcgagcgcaggcggttttttaagtctgatgtgaaagccctcggcttaaccgaggaagtgcatcggaaactgggaaacttgagtgcagaagaggacagtggaactccatgtgtagcggtgaaatgcgtagatatatggaagaacaccagtggcgaangcggctgtctggtctgtaactgacgctgaggctcgaaagcatgggtagcgaacaggattagataccctggtagtccatgccgtaaacgatgaatgctaggtgttggagggtttccgcccttcagtgccgcagctaacgcattaagcattccgcctggggagtacgaccgcaaggttgaaactcaaaggaattg

SEQ ID NO: 179 - protein, 394 aa, Bacillus subtilis
  source 1..394: note = CS00001_ Phosphoglycerate kinase
MNKKTLKDIDVKGKVVFCRVDFNVPMKDGEVTDDTRIRAALPTIKHLAEQGAKVLLASHLGRPKGEVVEELRLTPVAARLGELLGKQVKKADEAYGDAVKAQISDMKDGDVLVLENVRFYPGEEKNDPELAKAFAELADVYVNDAFGAAHRAHASTAGIAEHLPAVAGFLMEKELDVLGKAVSNPDRPFTAIIGGAKVKDKIGVIESLLDKVDNLIIGGGLAYTFVKALGHEVGKSLLEEDKIELAKSFMDRAKEKGVNFYMPEDVLVADDFSNDANVKIVPISEIPSDLEAIDIGTKTRETYADVIKNSKLVVWNGPMGVFEIDLFAQGTKAVAEALAEAKDTYSVIGGGDSAAAVEKFGLADKMSHISTGGGASLEFMEGKELPGVAALNDK

SEQ ID NO: 180 - protein, 132 aa, Bacillus subtilis
  source 1..132: note = CS00001_30S ribosomal protein S8
MVMTDPIADMLTRIRNANMVRHEKLEIPASKLKREIAEILKREGFIRDVEFVEDSKQGIIRVFLKYGQNNERVITGLKRISKPGLRVYAKSNEVPRVLNGLGIAIISTSQGVLTDKEARAKQAGGEVLAYVW

SEQ ID NO: 181 - protein, 166 aa, Bacillus subtilis
  source 1..166: note = CS00001_50S ribosomal protein L10
MSSAIETKKVVVEEIASKLKESKSTIIVDYRGLNVSEVTELRKQLREANVEFKVYKNTMTRRAVEQAELNGLNDFLTGPNAIAFSTEDVVAPAKVLNEFAKNHEALEIKAGVIEGKVSTVEEVKALAELPSREGLLSMLLSVLQAPVRNFALAAKAVAEQKEEQGA

SEQ ID NO: 182 - protein, 95 aa, Bacillus subtilis
  source 1..95: note = CS00001_50S ribosomal protein L23
MKDPRDVLKRPVITERSADLMAEKKYTFEVDVRANKTEVKDAVESIFGVKVDKVNIMNYKGKSKRVGRYTGMTSRRRKAIVKLTADSKEIEIFEA

SEQ ID NO: 183 - protein, 556 aa, Bacillus subtilis
  source 1..556: note = CS00001_Arginine--tRNA ligase
MNIAEQMKDVLKEEIKAAVLKAGLAEESQLPNVILETPKDKTHGDYSTNMAMQLARIAKKAPRQIAEEIVAHFDKGKASIEKLDIAGPGFINFYMNNQYLTKLIPSVLEAGEAYGETNIGNGERVQVEFVSANPTGDLHLGHARGAAVGDSLCNVLSKAGYDVSREYYINDAGNQINNLALSVEVRYFEALGLEKPMPEDGYRGEDIIAIGKRLAEEYGDRFVNEEESERLAFFRDYGLKYELEKLRKDLENFRVPFDVWYSETSLYQNGKIDKALEALREKGHVYEEDGATWFRSTAFGDDKDRVLIKKDGSYTYLLPDIAYHKDKLDRGFDKLINVWGADHHGYIPRMKAAIEALGYEKGTLEVEIIQLVHLYKNGEKMKMSKRTGKAVTMRDLIEEVGLDAVRYFFAMRSADTHMDFDLDLAVSTSNENPVYYAQYAHARICSMLRQGEEQGLKPAADLDFSHIQSEKEYDLLKTIGGFPEAVAEAAEKRIPHRVTNYIYDLASSLHSFYNAEKVIDPENEEKSRARLALMKATQITLNNALQLIGVSAPEKM

SEQ ID NO: 184 - protein, 187 aa, Bacillus subtilis
  source 1..187: note = CS00001_Protein GrpE
MSEEKQTVEQNETEEQEVIEEQAAAEEQQEETNESELLQNQINELQGLLEEKENKLLRVQADFENYKRRSRLEMEASQKYRSQNIVADLLPALDSFERALQVEADNEQTKSLLQGMEMVHRQLVEALKKEGVEAIEAVGQEFDPNLHQAVMQAEDENYGSNIVVEEMQKGYKLKDRVIRPSMVKVNQ

SEQ ID NO: 185 - protein, 372 aa, Bacillus subtilis
  source 1..372: note = CS00001_protein NusA
MSSELLDALTILEKEKGISKEIIIEAIEAALISAYKRNFNQAQNVRVDLNRETGSIRVFARKDVVDEVYDQRLEISIEEAQGIHPEYMVGDVVEIEVTPKDFGRIAAQTAKQVVTQRVREAERGVIYSEFIDREEDIMTGIVQRLDNKFIYVSLGKIEALLPVNEQMPNESYKPHDRIKVYITKVEKTTKGPQIYVSRTHPGLLKRLFEIEVPEIYDGTVELKSVAREAGDRSKISVRTDDPDVDPVGSCVGPKGQRVQAIVNELKGEKIDIVNWSSDPVEFVANALSPSKVLDVIVNEEEKATTVIVPDYQLSLAIGKRGQNARLAAKLTGWKIDIKSETDARELGIYPRELEEEDDEPLFTEPETAESDE

SEQ ID NO: 186 - protein, 400 aa, Lactobacillus plantarum
  source 1..400: note = CS00007_ Phosphoglycerate kinase
MAKLIVSDLDVKDKKVLIRVDFNVPIKDGKIGDDNRIVAALPTIKYVIEHDGKAILFSHLGRIKSEDDKKGLSLRPVAERLSNLLNKPVTFVPVTEGEQLETAINNMNDGDVLVVENTRFEDVVNGEQVKRESGNDPELGKYWASLGDVYVNDAFGTAHRSHASNVGIASNMDQVAAGFLMEKEIKFLGDAVDNPKHPFVAILGGAKVSDKIGVIDHLISKADKIIIGGGMTYTFYAAKGMGIGNSLVEKDKIELAKSIIEKAGDKLVLPSDSIVAEKFDNDVPSKVVEGSIPDGYMALDIGPKSIEEFEDVLRDAKTVVWNGPMGVFEMSNYAKGTLEIGKFLGTLSDATTIVGGGDSTAAVKQLGVGDKLTHISTGGGASLEYLEGKELPGIAAISEK

SEQ ID NO: 187 - protein, 131 aa, Lactobacillus plantarum
  source 1..131: note = CS00007_30S ribosomal protein S8
MMTDPIADFLTRIRNANMVRHDSLEVPASKIKRNIAEILKNEGFVRDVEYIDDDKQGIIRVFLKYGKDNERVISGLKRISKPGLRSYVKADAVPKVLNGLGIAIISTSEGVITDKEARAKKLGGEVLAYVW

SEQ ID NO: 188 - protein, 167 aa, Lactobacillus plantarum
  source 1..167: note = CS00007_50S ribosomal protein L10
MSKETIAVKAQEVEEVAEQLKSSVSAIVVDYRGLTVEQVTDLRKQLREAGVKMRVIKNKIMVRAADKAGFEDLKPVFAGPTAVAFSEEDPVAPAKILANFAKTADALQLKGGVIEGKVADLETVQEYATMPSREELLATIANLLQAPVRNVAYAVKAVAEKGDEDAA

SEQ ID NO: 189 - protein, 97 aa, Lactobacillus plantarum
  source 1..97: note = CS00007_50S ribosomal protein L23
MEARDVILRPVVTESSMADLDDKRYTFDVNVQATKTQVKKAIEEIFDVKVVKVNVMNVKGKLKRQGRYAGYTKKRRKAIVTLSSDSNEIKLFNDDQQ

SEQ ID NO: 190 - protein, 562 aa, Lactobacillus plantarum
  source 1..562: note = CS00007_Arginine--tRNA ligase
MDYKQLVAAALAPALPDLTQEAILDKIEQPKTSKQGDLAFPTFTLAKTLHKAPQMIASDIVEKVDGSDFEKVVAMGPYVNFFFKKDAFAADILNQVLSNGGHFGDAKLGEAGQVPIDMSSPNIAKPISMGHLRSTVIGNSLANILSKLDYQPVKINHLGDWGTQFGKLITAYKMWGSEAEVKADPINNLLKYYVRFHKEDVDHPEMDDEAREWFKKLENGDEEATHLWSWFRSESLKAFKKIYQRLDIDFDSFKGEAFYNDKMQEVVDILEDKHLLQESQGAEVVDLSKYDLNPALIKKSDGATLYITRDLAAAIYRKRTYDFVQSLYVVGNEQTNHFKQLKAVLTEMGFDWADQIHHIPFGLITSGGKKLSTRSGRVILLDKVLDDAVALAHEQIEAKNPDLPNKDEVADAVGIGAVVFHDLKNERMNSFDFNLEEVVRFEGETGPYVQYAHARAESILRKAGSPEIAATEQTLSDPAAWDTLKLLSEFPATVVRASTEYEPSVIAKYAIHLAKAYNKYYANTKILVEDDELNARLALVKSVSIVLKEALRLLGVKAPNEM

SEQ ID NO: 191 - protein, 202 aa, Lactobacillus plantarum
  source 1..202: note = CS00007_Protein GrpE
MKTLAKKSTRTTPEDSQASTTDSAATSTASEATQAATSTTDDQAEQTTAVDPTQQITDLKAQLDAKDDQLLRAQAEIVNMQNRNKKEQAALLKYDGQALAKDVLPVLDNLERALATPADDEAAQQLKKGVEMVYGHLQDALKKHGVTEVAAAGEKFDPNIHQAVQTVPVDDDHPADTVVQVLQRGYLLKDRTLRPAMVVVAQ

SEQ ID NO: 192 - protein, 405 aa, Lactobacillus plantarum
  source 1..405: note = CS00007_protein NusA
MSKELLGALDTLESEKGIKKEVVIEALEAALVSAYKRNYGQAQNVEVDFDQIKGNIHVYAVKEVVEDVFDSRLEVSLQDALAINRAYEIGDDIRFEVTPKNFGRIAAQTAKQVIMQRVREAERGIIYDEYSQYENEIVTGEVERQDNRFVYVSLGKVEAVMGRSDQLPGEVYRIHDKIKVYVSKVENATKGPQVFVSRTAPDLLKRLFEQEVPEIFDGIVEIVSIAREAGDRAKVAVRSNNPNVDPVGTCVGPKGQRVQTIVNELHGENMDIVEWTDDQAVFIANALNPAEVLDVIFDPENERGCTVVVPDYQLSLAIGKRGQNARLAAKLTGFKIDIKSETEASDIMDANPDDVAVAETETTEAASDAAVQSDTGEDEEPATSDAAVATPASETAVDESASDAE

SEQ ID NO: 193 - protein, 403 aa, Lactobacillus acidophilus
  source 1..403: note = CS00008_ Phosphoglycerate kinase
MAKLIISDLDVKGKKVLVRVDFNVPIKDGVIGDDNRIVAALPTIKYIIEHGGKAILLSHLGRVKSDADKKELSLKPVAERLSELLDKPVTFVPSNEGKEVEEAIDNMKDGDVVVLENTRFQDIDNDFGKRESGNDPKLGEYWASLGDIFVNDAFGTAHRSHASNVGIATAMKENGKPAAAGYLLEKEIKYLGDAVDNPVHPFVTILGGAKVSDKIGVIENLIPKSDHILIGGGMAYTFLAAQGHKIGKSLFEADKVDLAKELLEKAGDKIVLPVDNVAATEFSNDASREVVGDDIPDNMMGLDIGPKTIAKFKDILKDAKTVVWNGPMGAFEMPNFAEGTLEVGRALANLTDATTIIGGGDSTAAAKQLGIAPKISHISTGGGASLNYLEGKVLPGIACVSDK

SEQ ID NO: 194 - protein, 132 aa, Lactobacillus acidophilus
  source 1..132: note = CS00008_30S ribosomal protein S8
MVMTDPIADYLTRIRNANMAKHDSVEIPASNIKKSISEILKREGFIRDYEVADDNKQGVIKVFLKYGPNGERVISGLKRISKPGLRNYVSAEDLPKVLNGLGIAIVSTSAGVITDKEARQKNVGGEVVAYVW

SEQ ID NO: 195 - protein, 170 aa, Lactobacillus acidophilus
  source 1..170: note = CS00008_50S ribosomal protein L10
MSKAAIAEKEKLVDAFAEELKAAKAILVINYLGLTVEEVTNMRKDLRDNDVKMKVIKNTYLRRAAAKAGIEGLDDTFVGPTAVIYTDNADDITEPARIVSKYEDDFDVIEIKGGMLEGKLTSKEEIKELASIPGREGLLSMLVSVLQAPVRDFAYAVKAVAESKDEDSAE

SEQ ID NO: 196 - protein, 100 aa, Lactobacillus acidophilus
  source 1..100: note = CS00008_50S ribosomal protein L23
MDARDIILRPVITEKSTNLMDDKKYTFDVLLTATKTQVRNAVEEIFDVKVKSVNIMNVRGKDKRVGRYTGKTARRRKAIVALTDDSNDIKIFQENTEDNK

SEQ ID NO: 197 - protein, 561 aa, Lactobacillus acidophilus
  source 1..561: note = CS00008_Arginine--tRNA ligase
MDFKNEVVDLVSSQVDLPKEKITALIERPKNAKMGDYAFPAFILAKTMHKNPAIIAKDIAENLNSDNFANIQAVGPYVNFAIDHEKLIASTLKDVLAEKEHYGDQKLGEGNVPIDMSSPNIAKPMSMGHLRSTVIGNSIAKTMKKVGYTPIKINYLGDYGTQFGKLIAAYKHWGNEEDVKKDPIMSLFHYYVKFHKEAENNPELDNEGREWFKKLEDGDPEAVELWKWFREVSLKDFKRIYKELGVTFDSYNGEAFFNDKMQPVIDELKDKGLLHESRGAQVVDMGEDENPAIIVKSDGTSIYLTRDLAAAEWRMKEYNFVKMLYVVGNEQAQHFVELKTVLKKMGYDWADEIHHVPFGLITQGGKKLSTRKGNVVFLDQVLRDAVNLAKKQIQEKNPDLADQDQVAHDVGVGAVVFHDLKNDRLDNFDFDLDEVVRFEGDTGPYVQYTNARAQSVLRKAAAMGEKPSEGDFNINDDWAFAVAKDLADFPRIVARSAEKFEPSVIAKFALDLAKKFNKYYANVKILTKDDQIGARLALVQATSIVLTESLRLLGVNAPKEM

SEQ ID NO: 198 - protein, 194 aa, Lactobacillus acidophilus
  source 1..194: note = CS00008_Protein GrpE
MSKEEFPSEKNLDKEENTSKPKKAVKKEAAKGEETKKNNENQKLAKEIADLKEKNKDLEDKYLRSEAEIQNMQNRYTKERAQLIKYESQSLAKDVLPAMDNLERALSVEADDDVSKQLKKGVQMTLDALVKAMKDHGVVEIEADGVKFDPTLHQAVQTVAAENDDQKDHVVQVLQKGYQYKDRTLRPAMVVVAQ

SEQ ID NO: 199 - protein, 389 aa, Lactobacillus acidophilus
  source 1..389: note = CS00008_protein NusA
MSKEMLEAFATLEKNKGIEQDVIVDAIKAALVAAYKKNYNQAQNVEVDFDERKGNFKVMAVKTVVDEVQDDRLEVSLKDALAINRAYEVGDEIRFEVTPKNFGRIAAQTAKQVIMQRLREAERNHIIDEYSQYEDELVTGTVERRDNRFVYVKIGNVEAVMPHRDQMPNEVYNPQDQIRVLVTHVGSDSKGAQITVSRTAPDMVKRLFEQEVPEIYDGTVEIVSIAREAGDRTKMAVKSNDPNIDPVGTCVGQKGARVQNVVNELGGENIDIVKYEEDPSDYIANALNPAEVIAVQFGEDEEEKSALVIVPDYQLSLAIGKKGQNVRLAARLTGYKIDIRPESEVEFVDEKSTDSVSKEDTDSSEDVVSTEESTADVTTEEKSEDNTEE

SEQ ID NO: 200 - protein, 396 aa, Lactobacillus rhamnosus
  source 1..396: note = CS00010_ Phosphoglycerate kinase
MAKLIVSDLDVKDKKVLIRVDFNVPIKDGVIGDDNRIVAALPTIQYVIDHGGKAILLSHLGRVKTEEDKAKLTLKPVAERLSELLKKPVTFVPATRGKELEDAIAKLNDGDVLLMENTRFEDLDGKKESGNDPELGKYWASLGDLFVNDAFGTAHRKHASNVGIASNMKQTAAGFLMEKEIKFLGDAVDNPKHPFIAILGGAKVSDKIGVIENLVPKADKILIGGGMTYTFYAAKGMSIGNSLVEKDKIDLAKKIMDQAGDKLLLPVDSVVAPEFSNDAPHKVVEGDIPDGYMALDIGPKTIQEFKDALKGAKTVVWNGPMGVFEMSNYAEGTLEVGRALGDLKDATTIIGGGDSTAAAKQLGIAPKITHISTGGGASLEYLEGKTLPGIAAISDK

SEQ ID NO: 201 - protein, 132 aa, Lactobacillus rhamnosus
  source 1..132: note = CS00010_30S ribosomal protein S8
MVLTDPIADYLTRIRNANMVRHESLVVPASKMKKDISEILKREGFIRDYEVIDDDKQGVIRIFLKYGKNNERVISGLKRISKPGLRSYVKSDAVPKVLNGLGIAIISTSEGVITDKEARAKNVGGEVLAYVW

SEQ ID NO: 202 - protein, 168 aa, Lactobacillus rhamnosus
  source 1..168: note = CS00010_50S ribosomal protein L10
MSEQAIAKKAELVKTISEQFKNATSAVVVDYLGLTVEQVTALRKELREAGVKMEVLKNTYLRRAADANGYEALDDVFKGPTAVAFSNDDPVAPARIMAKYADQFDALKIKGGIIENKVASLDTIMEMSKMPDREGLLSQLASVLQAPVRDFALVVKAIAESKDEEPAA

SEQ ID NO: 203 - protein, 100 aa, Lactobacillus rhamnosus
  source 1..100: note = CS00010_50S ribosomal protein L23
MEARDIILRPIVTEQSMAEMDNRKYTFEVAIHATKPQVRKAVEEIFGVKVVNVNIANVRGKKKRQGRYEGMTRRRRKALVALSADSKEIKIFADEDNDNK

SEQ ID NO: 204 - protein, 560 aa, Lactobacillus rhamnosus
  source 1..560: note = CS00010_Arginine--tRNA ligase
MDFKELVVKALVPVLDGQLDEAGITALVETPKSSDLGDFAFPTFSLAKILHQAPKMIASDLVAKIDASPFEQVKAVGGYVNFYLDKISFAHEVLKAIAQSGEHFGDAKLGEGNVPIDMSSPNIAKPMSMGHLRSTVIGNALANILQKVGYSPIKINHLGDWGTQFGKLIVAYKKWGSEADVKADPIKNLLQYYVKFHEVAETDPELEDEARAWFKRLEDGDKEAITLWRWFRTVSLAEFNRIYKILGVDFDSYNGEAFYNDKMDSVVKTLEDKHLLKTSQGAEIVDLSKYNLNPALIKKSDGATLYMTRDLAAAIFRKEHYHFVQSLYVVGNEQREHFQQLKAVLLEMGYEWANDIHHIPFGLITANGKKLSTRRGNIILLEKVLKDAVGLAQQQIDEKHPDLPNAEKVAHEVGVGAVIFHDLKNERLDNFDFNLEEVVRFEGETGPYVQYTNARAHSILRKANIAPAPEVALSDPAAWDVLRALGDYPSIVVRAAKEYEPSVIAKYALRLAKAFNKYYANVKVLVEDSELPARLAMVSATTQVLENALHLLGVAAPEEM

SEQ ID NO: 205 - protein, 197 aa, Lactobacillus rhamnosus
  source 1..197: note = CS00010_Protein GrpE
MAEQKAKQTAADTAKDAKHAADTPETSLKEEILQESIADLNEQLKTSKHDGEQLKQERDAFEDKYLRAAAEIQNMNARFEKEQQKMLKYDGQKLAKAILPVVDNLERALATEAKDDSAASLKKGVQMVYDHLERALKENGITAIDGAGDKFDPNTQQAVQTVAADDQHPADTVAQVLQKGYYLKDRVLRPAMVVVAK

SEQ ID NO: 206 - protein, 404 aa, Lactobacillus rhamnosus
  source 1..404: note = CS00010_protein NusA
MSKEMIQALDALEQEKGVKKEVVIEALEAALVSAYKRNYNQAQNVDVEFDPKQGDIHVYAVKEVTDEVFDSRLEVSLKDALAINKAYEIGDQIKFEVTPKDFGRIAAQTAKQVIMQRVREAERSIVYDEYSQYEDEILQGVVERRDNRFIYVNLGKIEAVLGRQDQMPNEKYEAHDRIKVYVTKVENTSKGPQVFVSRTHPGLVKRLFEQEVPEIFDGTVEIVNIAREAGDRTKIAVRATNDAVDAVGTTVGPRGARVQAVVNELSGENMDVVQWEEDPADYIANALNPAQVIAVQFNDEDNDRSATVIVPDYQLSLAIGKKGQNARLAAKLTGYKIDIKPESEVEFVDDDELSEAEVEAAAAAAADDQDNASQAPSDSAEVDQANDEADETPVTPSTHDQPQA

SEQ ID NO: 207 - protein, 396 aa, Lactobacillus casei
  source 1..396: note = CS00017_ Phosphoglycerate kinase
MAKLIVSDLDVKDKKVLIRVDFNVPIKDGVIGDDNRIVAALPTIQYVIDHGGKAILLSHLGRVKTEEDKAKLTLKPVAERLSELLKKPVTFVPATRGKELEDAINKMNDGDVLVMENTRFEDLDGKKESGNDPELGKYWASLGDLFVNDAFGTAHRSHASNVGIASNMKQTAAGFLMEKEIKFLGDAVDNPKHPFIAILGGAKVSDKIGVIENLVPKADKILIGGGMTYTFYAAKGMSIGKSLVEKDKIELAKKIMDQAGDKLLLPVDSVVATEFSNDAPHKVVDGDIPDGYMALDIGPKTIKEFKDALQGAKTVVWNGPMGVFEMSNYAEGTLEVGRALGDLKDATTIIGGGDSTAAAKQLGIAPKITHISTGGGASLEYLEGKTLPGIAAISDK

SEQ ID NO: 208 - protein, 132 aa, Lactobacillus casei; identical to SEQ ID NO: 201
  source 1..132: note = CS00017_30S ribosomal protein S8

SEQ ID NO: 209 - protein, 168 aa, Lactobacillus casei
  source 1..168: note = CS00017_50S ribosomal protein L10
MSEQAIAKKAEIVKSISEQFKSATSAVVVDYLGLTVEQVTALRKELREAGVKMEVLKNTYLRRAADANGYEALDDVFKGPTAVAFSNDDPVAPARIMAKYADQFDALKIKGGIIENKVASLDTIMEMSKMPDREGLLSQLASVLQAPVRDFALVVKAVAEAKDEEPAA

SEQ ID NO: 210 - protein, 100 aa, Lactobacillus casei
  source 1..100: note = CS00017_50S ribosomal protein L23
MEARDIILRPIVTEQSMAEMDNRKYTFEVALHATKPQVRKAVEEIFGVKVVNVNIANVRGKKKRQGRYEGMTRRRRKALIALSADSKEIKIFADEDNDKK

SEQ ID NO: 211 - protein, 560 aa, Lactobacillus casei
  source 1..560: note = CS00017_Arginine--tRNA ligase
MDFKELVVKALEPALAGQLDAAAIKSLIETPKSSDLGDYAFPTFSLAKIMHRAPKMIASDLVGQIDVTPFEQVKAVGGYVNFYLDKISFAHDVLKVIAQAGEHYGDANIGSGNVPIDMSSPNIAKPMSMGHLRSTVIGNALANILSKIGYTPIKINHLGDWGTQFGKLIVAYKKWGSEDAVKADPIKNLLHYYVEFHEKAEANPELDDEARAWFKRLEDGDEEAIALWRWFRTVSLAEFNRIYKILGVDFDSYNGEAFYNDKMADVVKRLEDKHLLKTSQGAEIVDLSAYNLNPALIKKSDGATLYMTRDLAAAIFRKEHYHFVQSLYVVGNEQREHFQQLKAVLLEMGYDWANDIHHIPFGLITANGKKLSTRKGNIILLENVLRDAVGLAKQQIAEKHPDLPNADKVAHEVGVGAVIFHDLKNERLDNFDFNLEEVVRFEGETGPYVQYTNARANSILRKAAIDPAPEVALSDPAAWDVLRALGDYPSMVLRAAKEYEPSVIAKYALRLAKAFNKYYANVKVLVEDSELPARLAMVKATTQVLTNALQLLGVGAPEEM

SEQ ID NO: 212 - protein, 196 aa, Lactobacillus casei
  source 1..196: note = CS00017_Protein GrpE
MAEQKAKHAANAAKKAEKSADTKETSLKEDILQESIADLNEQLSNSKHDGEQLKQERDDFEDKYLRAAAEIQNMNARFEKEQQKLLKYDGQKLAKAILPVVDNLERALATEAKDDSAVSLKKGVQMVYDHLERALKENGITAIDGAGDKFDPNTQQAVQTVAADDQHPADTVAQVLQKGYYLKDRVLRPAMVVVAK

SEQ ID NO: 213 - protein, 417 aa, Lactobacillus casei
  source 1..417: note = CS00017_protein NusA
MSKEMIQALDALEQEKGVKKEVVIEALEAALVSAYKRNYNQAQNVDVEFDPKQGDIHIYAVKEVTDEVFDSRLEVSLKEALAINKAYEIGDQIKFEVTPKDFGRIAAQTAKQVIMQRVREAERSIVYDEYSQYEDEILQGVVERRDNRFIYVNLGKIEAVLGRQDQMPNEKYEAHDRIKVYVTKVENTSKGPQVFVSRTHPGLVKRLFEQEVPEIFDGTVEIVNIAREAGDRTKIAVRSTNDAVDAVGTTVGPRGARVQAVVNELSGENMDVVQWEEDPADYIANALNPAQVIAVQFNDEANDRSATVIVPDYQLSLAIGKKGQNARLAAKLTGYKIDIKPESEVEFVDDDELPEAEAEAAAETNDNADAATDAETTPDSDAAAADDADDAKTASDAPDSADQAPVTPSATDHPAQA

SEQ ID NO: 214 - protein, 246 aa, unidentified
  source 1..246: note = Saccharomyces boulardii; CS00018_Exoribonuclease, phosphorolytic domain 1
MSRLEIYSPEGLRLDGRRWNELRRFESSINTHPHAADGSSYMEQGNNKIITLVKGPKEPRLKSQMDTSKALLNVSVNITKFSKFERSKSSHKNERRVLEIQTSLVRMFEKNVMLNIYPRTVIDIEIHVLEQDGGIMGSLINGITLALIDAGISMFDYISGISVGLYDTTPLLDTNSLEENAMSTVTLGVVGKSEKLSLLLVEDKIPLDRLENVLAIGIAGAHRVRDLMDEELRKHAQKRVSNASAR

SEQ ID NO: 215 - protein, 682 aa, unidentified
  source 1..682: note = Saccharomyces boulardii; CS00018_Heat shock protein 70 family
MFFNRLSAGKLLVPLSVVLYALFVVILPLQNSFHSSNVLVRGADDVENYGTVIGIDLGTTYSCVAVMKNGKTEILANEQGNRITPSYVAFTDDERLIGDAAKNQVAANPQNTIFDIKRLIGLKYNDRSVQKDIKHLPFNVVNKDGKPAVEVSVKGEKKVFTPEEISGMILGKMKQIAEDYLGTKVTHAVVTVPAYFNDAQRQATKDAGTIAGLNVLRIVNEPTAAAIAYGLDKSDKEHQIIVYDLGGGTFDVSLLSIENGVFEVQATSGDTHLGGEDFDYKIVRQLIKAFKKKHGIDVSDNNKALAKLKREAEKAKRALSSQMSTRIEIDSFVDGIDLSETLTRAKFEELNLDLFKKTLKPVEKVLQDSGLEKKDVDDIVLVGGSTRIPKVQQLLESYFDGKKASKGINPDEAVAYGAAVQAGVLSGEEGVEDIVLLDVNALTLGIETTGGVMTPLIKRNTAIPTKKSQIFSTAVDNQPTVMIKVYEGERAMSKDNNLLGKFELTGIPPAPRGVPQIEVTFALDANGILKVSATDKGTGKSESITITNDKGRLTQEEIDRMVEEAEKFASEDASIKAKVESRNKLENYAHSLKNQVNGDLGEKLEEEDKETLLDAANDVLEWLDDNFETAIAEDFDEKFESLSKVAYPITSKLYGGADGSGAADYDDEDEDDDGDYFEHDEL

SEQ ID NO: 216 - protein, 493 aa, unidentified
  source 1..493: note = Saccharomyces boulardii; CS00018_NADPH-sulfite reductase
MSFVQIRHISSQINRKTVSIVGSGPSGFYTAYHLLKKSPIPLNVTIWEKLPVPFGLSRYGVAPDHPEVKNCEETFTTCAEEFSSPTNQKHKFSFVGGITIGKEILLKELLDNQDAVILSYGCTGDRKLNIPGELGTKGVFSSREFVNWYNGHPDFAKDKRFTDFDWSKVSKVGIIGNGNVALDITRVLISNQIDEIWENTDISSLALNLLRRAPVKDVKLIARRDFVHSKFTNKELRELWELEKYGIRGRIDPKFFQKEMFDPSKYDRAFNRRVEMCSEYLKPFNERSKKNYKKAPPPSSGYDKFWELDYLKTPLKINRDDFGAINSLSLCNNRLNEDNSLQPLKDVNNIMTYKVDLLITSLGYAGVPMPEFSKLSIGFDKDHIANKQGRVLTSSGEIFPHLYASGWIRKGSQGVIASTMQDAFEVGDRVIQDLVVSGALSLENSIDLSNIKHTTWKDWERINKKELLRGKKEHKTRSKFLTFEELWNGVEGI

SEQ ID NO: 217 - protein, 741 aa, unidentified
  source 1..741: note = Saccharomyces boulardii; CS00018_p-loop containing nucleoside triphosphate hydrolase protein
MVDTAPYIGSLGRSSLFDTGDIEQAPGNNAIGINEEDIHAFVSSTGETVQLKKKPAKLATGNISLYTNPDTVWRSDDTYGININYLLDKIEASGDDRTNAQKTSPITGKIGSDTLWVEKWRPKKFLDLVGNEKTNRRMLGWLRQWTPAVFKEQLPKLPTEKEVSDMELDPLKRPPKKILLLHGPPGIGKTSVAHVIAKQSGFSVSEINASDERAGPMVKEKIYNLLFNHTFDTNPVCLVADEIDGSIESGFIRILVDIMQSDIKATNKLLYGQPDKKDKKRKKKRSKLLTRPIICICNNLYAPSLEKLKPFCEIIAVKRPSDTTLLERLNLICHKENMNIPIKAINDLIDLAQGDVRNCINNLQFLASNVDSRDSSASDKPACAKNTWASSNKDSPISWFKIVNQLFRKDPHRDIKEQFYELLNQVELNGNSDRILQGCFNIFPYVKYSDNGIRKPANISDWLFFHDLMYQSMYAHNGELLRYSALVPLVFFQTFGDIANKDDIRMKNSEYEQRELKRANSDIVSLIMSHISVQSPLMASFTDRKSLIFEILPYLDSMISSDFNKIRNLKLKQAIMEELVQLLKSFQLNLIQNRSEGFDVRGGLTIDPPIDEVVLLNPKHINEVQHKRANNLSSLLAKIEENRAKKRHIDQVTEDRLQSQEMHSKKVKTGLNSSSSTIDFFKNQYGLLKQTQELEETQKTIGSDETNQADDCNQTVKIWVKYNEGFSNAVRKNVTWNNLWE

SEQ ID NO: 218 - protein, 679 aa, unidentified
  source 1..679: note = Saccharomyces boulardii; CS00018_PAN2-PAN3 deadenylation complex subunit PAN3
MDKINPDWAKDIPCRNITIYGYCKKEKEGCPFKHSDNTTATTINDVPPPIDVGEATTPTMTSVPKFNAKVSASFTPMTVGSDSLTTVTNTTSAATNATGNIAIAATSATNATVNPMINPIVNSSLVNNNNNSSNISISIPTTASSSNYDPFNAPIFTPSSTSSIHTNANAHSFPFPSIANSGGININATNDNSNNMSMANNVPPPMQPPPIESSNLKYPRIYPPPHSLLQYHLYAPEQPSSLKSLLKPNERSADQLFIPNNIREDLTKKNLSILQVFPSSGKVIPSIVQDYFNLVPLNFNNNDFLNKTTLFKVFSNYDGKAYVLKRLPNIDKSMNPNKISKIYQIWSKINCTNLIKFRDIFQTTKFGDLSICLVFDYYPNSLSLYDYHFVNFPKFPITNNYLWIYLVQLTNVINSIHSQNLSIGNTLNWRKVLITGDPGRIKLSHCNFMDLLFNDDTDTVVSSGGSTIEGQQQLDYKYLGELLFNLSINIENSNNNTAPKEYRLEEITPQSIDDMRQIDDKFKDVLKYLISDNGDSKKNIHDLTSHFYDKMFMVLESSQTYTEYMESVLSRELENGRLFRLINKLNCIFGRIESRIDINWSESGTKFPIILFYDYVFHQVDSNGKPIMDLTHVLRCLNKLDAGIQEKLMLVTPDELNCIIISYKELKDLIESTFRSITQ

SEQ ID NO: 219 - protein, 1008 aa, unidentified
  source 1..1008: note = Saccharomyces boulardii; CS00018_Ribosomal protein S5 domain 2-type fold
MEGDDLFDEFGNLIGVDPFDSDEEESVLDEQEQYQTNTFEGSGNNNEIESRQLTSLGSKKELGISLEHPYGKEVEVLMETKNTQSPQIPLVEPVTERTKLQEHTIFTQLKKNIPKTRYNRDYMLSMANIPERIINVGVIGPLHSGKTSLMDLLVIDSHKRIPDMSKNVELGWKPLRYLDNLKQEIDRGLSIKLNGSTLLCTDLESKSRMINFLDAPGHVNFMDETAVALAASDLVLIVIDVVEGVTFVVEQLIKQSIKNNVAMCFVINKLDRLILDLKLPPMDAYLKLNHIIANINSFTKGNVFSPIDNNIIFASTKLGFTFTIKEFVSYYYAHSIPSSKIDDFTTRLWGSVYYHKGNFRTKPFENVEKYPTFVEFILIPLYKIFSYALSMEKDKLKNLLRSNFRVNLSQEALQYDPQPFLKHVLQLIFRQQTGLVDAITRCYQPFKLFDNKTAHLSSPGKSTPEGTLWAHVLKTVDYGGAEWSLVRIYSGLLKRGDTVRILDTSQSESRQKRQLHDISKTETSNEDEDEDDETPSCEVEEIGLLGGRYVYPVHEAHKGQIVLIKGISSAYIKSATLYSVKSKEDMKQLKFFKPLDYITEAVFKIVLQPLLPRELPKLLDALNKISKYYPGVIIKVEESGEHVILGNGELYMDCLLYDLRASYAKIEIKISDPLTVFSESCSNESFASIPVSNSISRLGEENLPGLSISVAAEPMDSKMIQDLSKNTLGKGQNCLDIDGIMGNPRKLSKILRTEYGWDSLASRNVWSFYNGNVLINDTLPDEISPELLSKYKEQIIQGFYWTVKEGPLAEEPIYGVQYKLLSISVPSDVNIDVMKSQIIPLMKKACYVGLLTAIPILLEPIYEVDITVHAPLLPIVEELMKKRRGSRIYKTIKVAGTPLLEVRGQVPVIESAGFETDLRLSTNGLGMCQLYFWHKIWRKVPGDVLDKDAFIPKLKPAPINSLSRDFVMKTRRRKGISTGGFMSNDGPTLEKYISAELYAQLRENGLVP

SEQ ID NO: 220 - protein, 236 aa, unidentified
  source 1..236: note = Saccharomyces boulardii; CS00018_Ribosome assembly factor mrt4
MPRSKRSKLVTLAQTDKKGRENKERIFDEVREALDTYRYVWVLHLDDVRTPVLQEIRTSWAGSKLIMGKRKVLQKALGEKREEEYKENLYQLSKLCSGVTGLLFTDEDVNTVKEYFKSYVRSDYSRPNTKAPLTFTIPEGIVYSRGGQIPAEEDVPMIHSLEPTMRNKFEIPTKIKAGKITIDSPYLVCTEGEKLDVRQALILKQFGIAASEFKVKVSAYYDNDSSTVESTNINME

SEQ ID NO: 221 - protein, 896 aa, unidentified
  source 1..896: note = Saccharomyces boulardii; CS00018_WD40-repeat-containing domain
MTQSLGIEQYKLSVVSGGKPALNNLSSVTGNKNIARLSQDQRNYIIPFNNQIKVYSVETRQCVKTLKFANNSLLSGIFLQEEENNESIVKILLGDITVPQQEDAHLITVFTNNGHVIVLNYKGKLVESPKHFKISLADEKLANVFHSEGNYRILTTFKDPSQKAHNSLQSYRLYALTFDDAKKQFEVAHQAEWHNVILSNISSNGKLLAHMCKDVSTKDHEHKSISVVSLFDDSVNLSFPLGSILSSQTQSLSSNTRYVSSMAIDNMGQQLAVGFASGVISIVSLADLQIRLLKWHIDSVLSLSFSHDGSYLLSGGWEKVMSLWQLETNSQQFLPRLNGIIIDCQVLGPQGNYYSLILQMTENNSNSDYQFLLLNASDLTSKLSINGPLPVFNSTIKHIQQPISAMNTKNSNSITSLNHSKKKQSRKLIKSRRQDFTTNVEINPINKNLYFPHISAVQIFDFYKNEQVNYQYLTSGVNNSMGKVRFELNLQDPIITDLKFTKDGQWMITYEIEYPPNDLLSSKDLTHILKFWTKNDNETNWNLKTKVINPHGISVPITKILPSPRSVNNSQGCLTADNNGGLKFWSFDSHESNWCLKKISLPNFNHFSNSVSLAWSQDGSLIFHGFDDKLQILDFDTFKKFESLENTKTVSEFTLDSEIQTVKLINDTNLIVATRTTLNAINLLRGQVINSFDLYPFVNGVYKNGYMDRLITCDERTGNIALVINQQLTDLDGVPTINYKSRIIIFDSDLSTKLGNFTHHEYISWIGWNYDTDFIFLDIESTLGVVGTTVNTQLSDEVNNEGILDGLVSNTITTSASNSDIFAEQLHKLSSRGKKSDTRDKNTNDNDEDEEDIALEFINGEKKDKLVNMNSFTSMFDNIQNVQMDTFFDRVMKVLT

SEQ ID NO: 222 - protein, 488 aa, Kwoniella shandongensis
  source 1..488: note = SBI00120_Exoribonuclease, phosphorolytic domain 1
LADPFAQNYPEAVDCTLPSSAQRCKFNPAGPYAGHYIATGGSDGLVEIWDLDTKGVIRTFEGHVRAVSGLSWSRNNRYLLTSSLDHNCIIWDLSYLSFPTVASSDASTSACTLSSPRVTTVRFDAPVIDAAFHPRNSKILLATLSTQEAVVVDLRPESQGRWILEATAEDPVVGEGDDVDMEEGRLNVTSALFSACGTRIYAGTSAGVLLVFDSRTKTVSAANTCCAEWQVLHRIKVANAGIRQINFDLTGNLILSSSDRALRTLYVSPLTGLLTPLHRFQDLINRTPWHAIGFSGDAEYVMGGAGHKMAHNIFVWDREAGHLVKVLEGPKEPLMDCDWHPTRPILASVTSSGDLHIWQTTSPDNWSAFAPGFEELDENVEYKEREDEFDIEDETILTRRKQAEEDLMIDVLTQVHDSYPIRPLAITSLPSGFAELDEQGQETEEAACVLAMRAADEWACEDGDDDEWEGFYMSLDLAEGLNEERLEG

SEQ ID NO: 223 - protein, 474 aa, Kwoniella shandongensis
  source 1..474: note = SBI00120_Heat shock protein 70 family
LDYHLYTSPLPHVSNGPTAQSGLHSFFISDDMRRMLQARQEAIYGGTASTAGLPHELLVYHSLYPLGISQDPVSKVYGLPTHVYRALNSVDGKTYCLRRIEGFKLSQEAAFSTMETWRRIRHPNIVSVREAFTTKAFNDSALMFCYDFHPDSHTLVDEHLNPEAVFAYNSRKRPSGMPVPERLLWSYVTQLANAIKAIHSSGLAARVIDTSKILVTGKNRFVSSLLRRGADLSRIRLNCCGILDVLTYDATTPLLQYQQEDLLGFGRVIGCLACAFFNPGPNFPAAMEHISRSYSPDLKNVMLYLLSKPSAHKSIDEVVRMLGQRLLNEFDAVQKWVPSCKFKLTASYADVLEGELAAEVENGRLVRLISKLGFINERPEFELDPRWSDTGDRCVLKLFRDYVFHSVDIQGKPVLDLSHVLTCLNKVCSLYLRTASDIQVDAALDERIMLVARDDQSCLVVSYREIKHCIEAAF

SEQ ID NO: 224 - protein, 596 aa, Kwoniella shandongensis
  source 1..596: note = SBI00120_NADPH-sulfite reductase
SHPPAILGINFGQSYASIAVIDKEGHASCIANEEGERQIACAVSYNGEEVYIGNGAKPQLVKNGKNTIMGFRNLLGHTYDEVDHTAILAAPLIADSKTPAYTVDVLIPAPAPTPAQSGRTTAANSGAATPAAREPIQSTKTITVPEITTLFLRTLFQSATDFLGVKPSGAVVSAPSWFTQDQEKALKAAAEDAGIHVLQVLDETAAVLVGYRATLSEERKERGLLGKPEEGDAGKEEARDKKIVVVDVGETSLSVTAVAAAEGQYTLLAADRDSKLGGREFDNLVLKHFAKEFTKKTKVALDVPCTESASSADKRAEAKLRLAVEHTKRSLSASSGAATCAVESLKDGYDLSGAINRMRFDGLAAGVYRQVGAKVAAVVEKAGLELTQVDEILLAGASTLFPGLQAHLALLVAPTTPVTAAMDPAEVIAIGCALQALHLATLPEELKLQDILAQPTRDVETIAQPIALVLPGSSDELVAAKIIESGSALPVRRRVAIPLASGTKGKVAFELWEAKDSVNVEKVERAPVEKDEDDEEFSDEEEEDDEIKTAVTKKTTLLTAVEVESHGADKIFLEVVVLKGGKLEARAWAEGKEAEA

SEQ ID NO: 225 - protein, 247 aa, Kwoniella shandongensis
  source 1..247: note = SBI00120_p-loop containing nucleoside triphosphate hydrolase protein
MPKSKRSKVVSLTKTDKKVKDDKKKLVNELRENLDKYEHCWVFSVGDMRNEALKEVRKQWKTGRLFYGRNKVMAIALGLTPEQEYKEGLSQIAKASSQILRISTNIKQKLRGPLGLFLTSHDPKETQEWFESFQVKEFARMGNRATSEVILPDGPILSYQSDPFPHSMDPQLRSLGLATVLVKGVPSLNNPHVVCRNGEKLTAEKARLLKLLGIQMAEFKVSLGDRWTRDVGFVPGAELHAGSDDEA

SEQ ID NO: 226 - protein, 909 aa, Kwoniella shandongensis
  source 1..909: note = SBI00120_PAN2-PAN3 deadenylation complex subunit PAN3
PTHITGLPPKPTFSLSTSSLGRIGLPVKPAAVPRKTTSALDDEAAPSRTLQTLTLPPVDPEANPDGVEAVAEPEPVVVKRTIKLEDDDDDAMEGVEVTNGRARRQFRPSAPVKKEEEEDDVDPLDAYMNVNSEEVAAVDAKDAHRTGSRIAAVDRDEEVDEEVLDAKAKELLQKEAILAQAAAKTRKKDLPPPDHSKIEYEPFRKAFYTPPKEVEEMTEEDSELMRLEMGSIKIRGKDAPKPVRNWGAFGLPAGLDVIKRNGYEAPTAIQAQTVPAIMSGRDVIGVAKTGSGKTLAFLLPLFRHIKAQRPLSANEGPIALIMTPTRELALQIHKEAKPFLKTLGMKVTTVYGGAPISEQIAAMKTGAELVVCTPGRMIDLLTANSGRVVNMRRVTYLVLDEADRMFDMGFEPQVMKIIGLIRPDRQTVLFSATFPKLMESLASRILHNKLEITVGGRSVVAPEIDQRVEIRSQESKFNRLLEILGEMAQLHDDPDFRTLIFVDRQESADDLFHNLLQRGYISTSLHGGKEQVDRDEAIKNFQKGDVPIVVATSVAARGLDVKELKLVINYDCPNHLEDYVHRAGRTGRAGNKGVCITFITPEQEKFSVDIVAAMTQSNAYVSDELKKMSDGFKEKIKLGRAKAASSGFRGKGLDKLEQRRDEKDRNERTTYGDTSEATSLSSREGALVAYRPEPKKGSTAQGGPADMRGEHDYTFSDIHVEIVHGPAPDKLPSALAGSGFGDVRIPPHTLAALAKARADGRTADAERLQIIVNKLQQSIAASKAERFGAAMFEANRKTKDPDATDWHAIFPINDFPQKARWKATNKEQMVQLIEMSGASITNKGEWYAPGTEPSPGEEPKLHLLIESNDDAKIRIAVDELRRILTEASFDALQTADRGGAGGAMGRYTV

SEQ ID NO: 227 - protein, 1711 aa, Kwoniella shandongensis
  source 1..1711: note = SBI00120_Ribosomal protein S5 domain 2-type fold
MAKGKSSASSNTRKKHAAKKSGNPEGTDAASQPVKGQQQPKQRGQKESKLSKAQRKALPKVKQYIPPPKAPAPPIPDPLDSQGLGRTLPPELVVVLRRLGKKDEVTRRKGVEELKEGWVEPVLRAQKQASADEAESLELELKEEALVGALPVWVHHLSTLLHSAAHKSPSLALFTSLLSIPSCLASITNTLALGLLPGTQNRDIIGSWLVTSLEEGRRPGPGAAGLRKWSEVVYFSPLSTTATSEVVDLTTAEAQESRLDLTPNLALLVEYLSSSILSPAELHSDVHPQPVSSTANTPSTSSPAPSARVLAKALKQQSRPSAVTVPTLSSQTVEDDDADGSNDEERWGRYRLTGLLGLTWLLQNLPAGELPEALVNLLKTPALWTCLSPLRTSTLLEDAEDGDAPISMGYEQPGVRRAGYALLAVLVESYSAIVSETDLLELLSRAVLGSCWAEKEGQVWETAGQSIVVFLASESPLWSVEAASDTISKVELTGDDDEGVSDDEEDEEDEDDPSSNETESAPTSGAVPSSSGYNSFLSFLANTCPAHPHYTYPLLLVIVSTIPATILPLDSAAAVSNLFSHFWSPADAHILSTHSLPGHNNFSAYQVFLQSALDCAAYLTGKAWRSEDAASKEVAASIVKEEVVDRAWTQGVLQKGGRGGQRRLGKGRAGKDEVEANMVGKILARAGAVDASLVDRVLPSIRQRTLDAAFPEGSSAAKSLLPRVLAIVDGLAVSAASLPTVSQMTESLLSDILRLAVGSAQQLSGQETPLAGEDKLRLGELWQVLGDLVVKHPANVDDEQYQVLVSELANKSTFLLKNLSGEQAAEIFSVFATLPEEREERKTVAQALAAALSPASSLDKALRFQMTQAVLAQGSGMMAEEGWLDDTALEITEGALKGAKESLAAMQSVIGASPTELIRAAYQLDLGTGSLSAADVAAAVLPSGGKVSEELDEFASRPAQITMPVLDNIVSYSNGSTSTSATSYDNFGRSAFARHVEGLITLFYMDRTLAVTSPGLLATAMSFACFAADELAVASSSRGVFGPNVSIDHLERVVQDVGQVFSYVLTSAGDLPVGWHQKTIQSLKANQPGHTDVLQGLLSASHGGANASGREIHARVFRNVLNGALRSGGATATDAELWLAYGMSLCEKSELAIAVITAVKELLLDGKAFDQAQNRLASTLTGVPLKKANTQGVTYLRLLAASAPPLGAASTFIPQQRAMFVMRHVAGWLTDESDEADDLAEEVEARVAEVYTALAPIVQDVPGAHWDSIFDLIESSLEASLADETTYGLLYQNLVLLTEVKDLCLTNKALRAAWTSRSAHLNLVLKLFLESQLSSLLRRSPLPIQRTAYGLLHDLTVRKTGQLVLDVEASVADAEDGHEGKKTIELAPEVVEVIKQGKGVVWSDVAAHDGAHLVILGQLLAWMTVFDHFEDASNTLRGAYLDQIRNESLIEQGLLPLLFEMLGVSEVGAWNFPASSFAVDEFYIDLEIHELADLTPLASHVYYRSLTSTPSIVRSFFEACKDRQLSLSLLNFTSRHFSPVIIYHEFAALKVPAAIAQLADEGLNVKVVTGGGASGVGSAEAVASYEIDEQPMEIGIRLPSDFPLKGVEVRDLRRVGVPENKWRGWLMGVQQLITSRNGLMLEALTVFKKNVALHFDGVVECAICYSIISLTDRTLPTKPCRTCKNRFHSSCLFKWFNSSHSSSCPMCRSLF

SEQ ID NO: 228 - protein, 288 aa, Kwoniella shandongensis
  source 1..288: note = SBI00120_Ribosome assembly factor mrt4
MATSLSPSERSYILTGLVHPTEPTRLDGRQLLEPRAISLEAGIAPQANGSARVVLAEGTEVVAGIKLEVVELGPGESWRGSVEVDVTPQAYPALQQSALQLLSTQFATVLQDHFMPSVPALPIVAPKKYFVPHLHLTLLSASSGSVLSALVLAARTAFADLRVPRIKQIGWEAVSANIAEGELDTSGIKGAIRAGKGGKKVNTKGEEWDLDLDVGDGAEYMADRKQLPVVVTLNLVPSSGVFFLDASPQEEAACPDRLHVFFTGSGKVCGLRLEGPAGIETERVPALL

SEQ ID NO: 229 - protein, 481 aa, Kwoniella shandongensis
  source 1..481: note = SBI00120_WD40-repeat-containing domain
PLKLAIVGAGPSGFYTASRILASLPDGNVEVHMYERLPTPYGLVRYGVAPDHPEVKVCGQHKFDELAADSRFRFFGNVSVGNPPSRGYTYPHSLSLPFASLQAHYNTILLTYGSSTSASLGIPGSGETALENVHPALDFVSWYNGHPAYADLGPNIDHLSKATVIGHGNVALDCARILLKSPEELRGTDIPLPVLDVLSASKIREVEVVGRRGPGQVAFTTKEFRELLALPSVEFGQVDTDLLAHAKELVGKDRMKNRLLGLMEKGNASQVSNPTKSFQLGFLRSPLEFLPSRFSPSARKVGSIKWSHNVLLAPPPTPPTPPTNSPVQTGQVVAQPTNETSLTRTDFVIESVGYKSEPLSEQVPFDTGRGRVRNVGGRVVDPSGNVVSVPSTSWSRAKPVGVIASTMHDAYALASTIISDHSSLPPSSTETGVPDELNANKEKVVGLDEWKKIDEAEVKRAGPGRVREKFLSVKEMLAVLQ

SEQ ID NO: 230 - protein, 348 aa, Kwoniella shandongensis
  source 1..348: note = SBI00120_Zinc finger C2H2-type
MSLWVDKYRPRQLDDLHYHPELSSRLKSLAASGDFPHILFYGPSGAGKKVRIMCTLRELYGPGVEKVRIDQRVFVTPSKRKLDVNVVQSNYHIELTPSDVGMYDRVVIQDILKEIAQTQQVDLNAKQKFKVVIINEADSLTRDAQAALRRTMEKYMGNMRLILCANSTSKIIAPIRSRCLLVRVAAPTEVQMTTVLTHVAKKERFHLPDEAGQAIIEESQGNLRKALLVFEALKMQRPDLNGSIDIAKPDWETYCAKVGDTILAEQSAVKLLAVRAMLYELLSHCIPPTVILKTVADRLIEKVDDVLKPEIVHWAAYYELRMRQGQKKIFHLEAFVAKVMSVYKSFNM

SEQ ID NO: 231 - protein, 382 aa, Kwoniella shandongensis
  source 1..382: note = SBI00120_Zinc finger, RING/FYVE/PHD-type
GNYAWEASYNRSWDVVQEDEEGGLQAAVDGLLARGRRRRCVEAGNPLRRSIIRHMFILIDLSDSMMDKDFRPDARFEVTLQYLRQFVVEWYDQNPLGQIGIIIMRDRIAEVIVEMGGNPQEVLAALKDKRRLEPSGEPSLQNGLQMAMGSMRYVPSTSSLEILVLFSSLSTADPEGPRDIHRCLKDLVGLNIRTSIIALAAELKICKQITEQTRGRFGVAEHEAHLKDLIWEAIPPPATVMGGSAPTTRGVKNALARGKAPAGDLMLMGFPTRLPVSGSESLCACHSEMKKGGFLCPRCNARICDVPTDCEVCGLMVVSSPHLARSYWLLFPVAHYDTLGVARVEDGVSPTGRYRCAKCASDFCGDCDISVHETLHACPGCS

SEQ ID NO: 232 - protein, 244 aa, Clavispora lusitaniae
  source 1..244: note = SBI00264_Exoribonuclease, phosphorolytic domain 1
MSRMELYSPEGLRVDGRRWNELRRFECKINTHPNSSDGSSYIEQGNTKVMCMVSGPKEPLMRSQTNQTRATIEINLNVASFSTLERKKRNKSEKRMVELKTTLERTFEQSILAHLYPRTLIEVHVQVLTQDGGLLASMTNAITLALVDAGVAMYDYVSAVNVALHDQTPLLDLNTLEENDMSCMTIGVVGKSEKLAMLLLEDKMPLDRLESVLGIAIAGGHRIRDLMDEEVRKHGNVRVAKLST

SEQ ID NO: 233 - protein, 679 aa, Clavispora lusitaniae
  source 1..679: note = SBI00264_Heat shock protein 70 family
MSRSQNSKLWMSGVSLFLVLMCVVMPFFSASGGLVVADDDADNYGTVIGIDLGTTYSCVGVMKNGKVEILANDQGNRITPSYVAFTAEERLIGDAAKNQAPSNVNNTVFDIKRLIGLDYSDKMVQKEIKHLPYKIVQKGNSPVVHVEVNGEATEFSPEEISAMILGKMKTIAEEYLGKKVTHAVVTVPAYFNDAQRLATKNAGTIAGLNVLRIVNEPTAAAIAYGLDKTDGEKQIIVYDLGGGTFDVSLLSIEGGVFEVLATAGDTHLGGEDFDFKLVRHFTRLFKKKHGIDVSSNPKAIAKLKREAEKAKRTLSSQISTRVEIDSFVDGIDFSEPISRAKFEEMNMESFKKTLGPVERVLADAGVKKSEVDDIVLVGGSTRIPKIQELIENYFNKKPSKGIHPDEAVAYGAAVQAGVLSGEEGVHDIVLLDVNPLTLGIETTGGVMTTLINRNTAIPTKKSQIFSTAADNQPTVLIQVFEGERALVKDNNMLGKFELTGIPPAPRGVPQIEVTFSLDANGLLKVEALDKGTGKAESITISNDQNRLSKEEIDRMVEEAEKYAAQDAEVKARIEARNSLENLVHNMKQKLDDENDEYLSKVSDEDKETLSDVVAEITEFLEDNYDTATSEEFEEQKQKLTDISSKISEKVYGNINNEGGAQFGDNDSDDSDDEFDHDEL

SEQ ID NO: 234 - protein, 447 aa, Clavispora lusitaniae
  source 1..447: note = SBI00264_NADPH-sulfite reductase
FLLPMSLIARIGRYSRRNYNVAIVGSGPAGFYTAHHLLHRNTGEPLKIDFFDRLPAPYGLSRYGVAPDHPEVKYCQEYMDDIMADYGDHVRFFGNVNVGHDISLLQLQKAYHLVVLAYGCTAADNSLAVPGAELPGVVSARQIVNWYNCHPDAETAPVPPLETVEDVTIIGNGNVAIDVARVLLADPTAHWAKTDILAAAVEVLRRSAVKRVNIVARRGLLQAAFTNKELRELLQLKGVRFVPVADEIMDEVVGEKLGRVEKRRVALLAKANEVDTEANTEKAWALEFLRSPVRFVAGADGRVAETVFEQNELEVEHGRAKVRGTGRTVRTKNQMVVLSIGYQGGALPGFDQVGLLFDGVHNCLAHRGGRMVDTSGAEIPGWYALGWARTGPRGVIASTMMEAFDTADKVLKDLGRGVRHPVEEGANGDVVAALPHRVDWAGWGRID

SEQ ID NO: 235 - protein, 716 aa, Clavispora lusitaniae
  source 1..716: note = SBI00264_p-loop containing nucleoside triphosphate hydrolase protein
KEVRLFNGTALRLKPRTTRTPDVSFSDADSILDMDRLYERVQQREVLRASRNDIRLRQPPVVPTDTPQIWAEKYRPKLYLQLCSAGNERHYRTIMHWLRKWGSVVFGRAADDGDMVDHLGRPLRKILLVHGPLGIGKTAAVHLIANQMGYAVQELNAANSMDAMHGADANDAAGRFANATAALRLKIKNALTTNAITSGGRPTCLVIDEIDCSINAGDIIRVLGDLVYQDLRPAPAETKKSKKRFVLNRPIICIANDIYSQNVRAGPNPMDKLRPLCEIVPFRRPATSSAVGARVNVAAQKSVKELLAAVNTKERVGLDAKEIAEVFEVCEGDIRACLNYMQFSSRRLDLDLHGSPEARALSKDTEVSWFALVDQLFRRDPKLSKDENFAVMMELLLSHEGKAATSTALDKVMRGCFNRYLDVVHLQDDSNVRVAEMSDWMYYYDLMTSAHMDIGNYPTVAALKFWSLFSEINAYKLKADNSLLPNARAAEFEAFETLKQNKAVVKHVSGLLPVEVRMAFSGSSASPEAYACQFLPLLDRMLSPEVGTAKAKASLRPHERVLVESLAAITKKWGIELETVRDLETKQVSLAFAPNWDSLTVFDTEYAPVALLVYARTIAQKRQWLFPLLEAELSLGHSKTKRPREDSLAANDSASTSKRARMSSSLDFFKDRYDNLNSQLEVAAKPAKHSALRIWVKYHEGFSNAVRKNIGWQDLW

SEQ ID NO: 236 - protein, 672 aa, Clavispora lusitaniae
  source 1..672: note = SBI00264_PAN2-PAN3 deadenylation complex subunit PAN3
MNINPDSAKDIPCKNVLIYGYCKYENKGCVFSHPLNLAAASSKASTLKTTLGASSVSEEEPKRRFNMNTPSFLPAVGALTNKFSALSPKLKEIPVFVPLGMDGNGNSNEPGTPGRGAHGDSSQGTQGDPANHGNPANHGNPASQGSPASQGIAGNLSQSVLGSDAPSRKFNVATPSFTPSNPMDAMLPAPLTAKNPYLGQTTPAEDYMYHHSLGALAYPLHHHLYAPAPPPRLAVPLSPHETNVHDMFIANDVRQLLTKKNEATLQTMPHLLLPDHVGVYHLLVPIDLTFDQLSKTYQLPCHVYKATSNASALPYVIRRLDHALHTPIANELPFRTVKRWRSIKNPNVVHLEDAFTSVAFSPHGEPALCLVYDYYPLAGTLLERHVTRRLATTLQPVTEDMLWLYLVQLTGALLDIHAVGLNAGSSVSTSKILVTNKNRVRLGAVCVDDILEYDAIEQTRADIGAEATIRKLQLGDVVRLGSVILELAATALPAGLRTGTPEEVLAHLERASSVTFSPEFLRTVRALTAVEDGFDLSAFYTRYLAQRALRLLNGLQDLTDYYEGQLLSELENGRLFRLIAKLNYLLDRPEQDGELRGNLFVIKLFREFVFQTTDDTGKPVVDLSRVLVNLNKLDVGVDEKILLVSRDEDSCLMVSYKEIKDVMDQTFRSVFR

SEQ ID NO: 237 - protein, 977 aa, Clavispora lusitaniae
  source 1..977: note = SBI00264_Ribosomal protein S5 domain 2-type fold
MDSDDEYDEFGNFIGDENKLEEFMEQKKGTDSIKLNNNGVDDTLMRDDETSHDDTENALTKHVDQNSTDYETIIVNPLQEVDEEPIIKPVSDQKLYIEYAAATDGLDLPEVTYSRDYMRSLQLSLPERVRNVAFVGNLHSGKTSLLDKLVLETHPGISESKHNNQEFRSIRYLDSHKLEKERGISINSSLISLLLADSKDRSYAVNIIDCPGHPDFQDDVSSTLQVVEGAVLVLDLLEGFSKRDKRTVTQLIKRNIPFTVVLNKFDRLILELRLPPRDFYLKVKYTLDDINLFIYHNEFIGTYTHEKLVSPLNNNVIFSSMVLKSTFSLKFFAHLYLKKEMSAKSFDEKHFEKLLWGDVSFNEETGKFTRLKPEAALDSKRTFELFVLDPIYKLTTYSLTSEKDGLELSKLLWDNFGVSLHKSAYKQDPQTLLALVFGSVFGNTVSLVDLISCTVPGPKSDYSVLANKGLELKDSESDTLVAEVFKMQLTPDMKEHLALVRIYNGSIREGQRVKIIGDHQSEGSKDESIVVIGQLFLGGGRYRVPIQEASSGSIVIVSGIGSYIDKCATILDGSFPKSLLKAVHWMQSDRRAVYKVAVEPEKPSELPKLVEGLRVLSKTYLSAIVRLEESGEHVILAPGELYMDCFLHDLRYLFDEYFSIKVSDPMVRFSETCAERSVTKIDTYTTSKQSRISITSEPLNDKNLSLAIEKGTLNLSQPSKVTSKILRTEFGWDSLAARSMWCFGPGDHQNASILLDDTIEGETDKESLLSVKDLIITGFKAGLSEGPLCDEPVRNCKFKILDAVISGSKLHSSGSQIIPMTRNAIHTGLMTASPKLMEPMYRVTVTCTYNSINAVQTILGKRRGWVVNENPIPATKLYEIEGYVPVIDSVGLDTDMRLQTQGQAMCLLDLARWDVVPGDPLDKDSPLPQMKPVPRRSMARDFVLKTRARKGLSGEPNLQKYLDPQLYSRLRDSGIIN

SEQ ID NO: 238 - protein, 228 aa, Clavispora lusitaniae
  source 1..228: note = SBI00264_Ribosome assembly factor mrt4
MPRSKRSKLVTLAQTDKKGKENKTRIFDEVREALDEFKYTWILQLDDVRTPVLQDIRSDWIGSKLMLGKRRVLEKALGDTPAEEYRDNLHKLSKLCAGVSGLLFTNESPETVEAYFKAYSKADYCRAKSKAPIDFTIPEGIVYSRGGQVPIEEDVPMSHSLEETLRNKYKIPTKIKSGKITINEPFAVCAKGDTLDVTQALILKQFGVAAAEFKVKMIAYYDSESSEV

SEQ ID NO: 239 - protein, 777 aa, Clavispora lusitaniae
  source 1..777: note = SBI00264_WD40-repeat-containing domain
WAVTMALGGKPVVQTGAGSFPAITAADGKHTIVVLAHQLRVYFLQTRQCIRTVNVDVSRAVAVFLDPENDSQLVVFTPEEVMHINWRERVEQVVVATQRVAPAVGLCDVFHVGRDHYYGAARDGAHLTVYRIDRETAAVRAVFSRAAVMHAACGDFLAVALETAVELFAWGELDVVAVAAADSTEAAVVPHTTLPHPARPPTALAVADDGTVAVGARSGAIHLVHAAAAAPRTLRWHMDAVRALAFSRDGTYLVSGGTEKVLVFWNLAHDTTQFLPRLGGVIDRIHVDARRPDHYAVALRLDDAHEVVVVLAVDLESRLAVSPVRPAYAVPVRKAAARARRKWAKGTDGHVVAHDLSAPVAVHPTTRHLYLPRGGAIQAFDLVRGEQAFVQHAAPQISTGRVRSEHKVADPVVSHVAFSADGAWMATFDSMPALAHDNLMLKNDALYALKFWRLTARGWELALKIVDPHGAAAVGALVAPTSSIHPDADGDAAAHVFVTVDVRGGIRTWRPRAGADGAARAQTVWTLRRATAAAAAELAVAACFTADASVLVVAHGGVSTAYDPQLLAALPLALPACDLPVEQLFLAGVNLVMVAQSRIVVYDLVRGRATALAARVKSPGAGHLVAVDGRGLVAVACNTFVAEGDDVVLRSKLVILRPELLVPVHEVHHGAGVAAVVASAGGFVFVDTDARVGIVAPETRAVVAGADLAAEMEATLVGARAAANLMYGRTTEARAERDPAPGTWTGPKLVDVATLLPVFAQTMSMDRLFERVVRTLQ

SEQ ID NO: 240 - protein, 592 aa, Clavispora lusitaniae
  source 1..592: note = SBI00264_Zinc finger C2H2-type
MKTCYYELLGVETTATDTELKKAYRKKALLLHPDKNPHDIEGANQRFALVRSAYEVLSDPQERSWYDAHKSQILRDDDDFVTADEPAEMIIPSISLQELLRYFNPSLYAQVDNSLSGMYSVAGRLFERLAAEEVTHGKYQQLPKFDKYMDDSPNANAIEDSFLLYPRLGNSHTDYATGIRNFYSTWNNFLSVKTFNWVDEYRYSAAPDRRTRRLMEKENKKARDAAKKEYNETVRKFVNFIKKRDPRVKKGADELENTRKKMQRENLERQAKELKVQKMAEMSDHKVQDWQEMDLQELEELEQMLRDEYNYDSDETTDSEFDEFEENLDGDYYECFACNKNFKSKNQFETHENSKKHKEMVELLKEEMRQEGIELGIDKDDIDLSEFETAESELSLAETGPESTQTKETSYDSTSKTVNGQVPRDVNTEVILNEQPENCDGGWNMLEVDDDIESDESEIKLNLRAKKSKKAKGKKKPNPIFDGDLDETTNNLDDELANIVNGIGIGDDDDWGNEKKKKKPKKKVDDNRLMSPAAPSPSQKKKSPDAPVKVPNGAERCAVCQEIFMSRNKLFQHVKKSGHAAPVIETKKKKGK

SEQ ID NO: 241 - protein, 563 aa, Clavispora lusitaniae
  source 1..563: note = SBI00264_Zinc finger, RING/FYVE/PHD-type
YGTCSTTLFLLSLASLASKAFDFFSLIHELTHSFHFTFLLNFVVFCFLLWGILSTRFLFGSLREIEIDHMGEQLPFFALNLLFILFNDDNVLLGMFWGATTVLIKVYHMITLDRLDYLQLTTVNNLERVNTPALIFRRFISSKFVWYILLYVFLDVLMAKLLVFDVFQGMSSICSLLYGIQFAVMAIDNLAYVWKLSLNVYELMFYRCPRAPSVETTNSSPIARDVSNPVVEIEGEGDFSLTADGEQIETPLRLDLPDETDEASRTAEIEEVEGDDDIDLSDDEDDDTERIWENKPLYYHTLDIMSSVIKSMFYLVFSYMLYFHSNGTPPLPMLQGGIMAVILVINKTNTFFSFLSNAKSLEKQLMDASADDLDGADHMCIICRDNMHLPHEYEARRHKPLSPRKYPKKLSCGHILHMGCLKDWLERSTNCPLCRKPVFPAPLETVPQTEVAAAPVVVPAPPVYQPPAGLMEVPETRHIFQELINSTERVRRGINAPAGPATAAQDITTQPATSESGVEAVVDETVPDGWEMLPLSSTGPDQYTVRLSSTHSGTLTLSENKRD

SEQ ID NO: 242 - protein, 394 aa, Exiguobacterium sp.
  source 1..394: note = SBI00449_ Phosphoglycerate kinase
MNKKSIRDIDVQGKRVFTRVDFNVPLEDGKITDDTRIRAALPTIKHLIEGGAKVILASHMGRPKGEKNPEFSLAPVVARLSELLGKDIKLVEEAYGPVAEEAVSKLENGDVVVLENVRFYSGETKNDEELAKGFAKLADVFVNDAFGAAHRAHASTEGIAHHVDTAVAGLLIEKELQVLGKALSNPDRPFTAIIGGSKVADKIGVIDHLLDIVDTLIIGGGLSYTFLTARGIEVGTSLLEVDKIDQAKEFMKKAEEKGVKFLMPVDCVITKEFGEETYVGPRDITEIPADHMSLDIGPKTVELYSEAIKNSKLVVWNGPMGVFELDKYANGTKGVAQALADSDAYSIIGGGDSAAAAEKFGLADKMSHISTGGGASLEFMEGKALPGVEALNDK

SEQ ID NO: 243 - protein, 132 aa, Exiguobacterium sp.
  source 1..132: note = SBI00449_30S ribosomal protein S8
MVMTDPIADMLTRIRNANMVRHEKLEMPASTIKREVAEILKREGFIRDVEYLEDSKQGTLRVFLKYGASNERVITGLKRISKPGLRVYAKADEIPKVLGGLGIAIVSTSKGVMTDKEARQQKVGGEVIAYIW

SEQ ID NO: 244 - protein, 168 aa, Exiguobacterium sp.
  source 1..168: note = SBI00449_50S ribosomal protein L10
MANEKVIAVKADLVSEIAEKLQASAGTVVVDYRGLTVEEVTELRKQLREAGVEFKVYKNGLLRRAAVQSNLEGLDEVFTGPSAIAFSNEDVIAPAKILNDFAKTHKALELKGGIIEGKVTSVEDVKALAELPSREGLLSMLLSVLQAPIRGLAVATNAIAEQKEEQSA

SEQ ID NO: 245 - protein, 94 aa, Exiguobacterium sp.
  source 1..94: note = SBI00449_50S ribosomal protein L23
MAHTHDIIKRPVITERSVNQMAEKKYTFEVDVKASKTQIKDAVEAIFGVKVDKVNTLISKPKAKRVGRHAGYTARRKKAVVTLTADSKELDYLG

SEQ ID NO: 246 - protein, 560 aa, Exiguobacterium sp.
  source 1..560: note = SBI00449_Arginine--tRNA ligase
MSYKAQYAEVLHQVMEGALSVEQIEQLIEQPKHEDHGDLAFPCFMLAKAFRKAPNMIASDLAEKIDAPLFSNVQAVGPYINVFLNREVVSQEIVNQVLTEQESFGSSEANGKTIVTDFSSPNIAKPFSMGHLRSTVIGNALNQISRKKGYDVVGVNHLGDWGTQFGKLMVAYTMWGEEEAVRAEPIKELLKLYVRFHEEAETNPSLEDEGRLWFKKLEQGDEQATTLWTWFREVSLVEFNRVYEMLGVKFDSLNGEAFYNDKMQHVIDLLEEKDLLVESEGAMVVDLEAEGMPPALIKKKDGATLYATRDLAAAIYRLETYRFEQAFYVVGGEQALHFKQLFAVLKKLGFENVDGMHHVPFGLIMKDGKKMSTRKGRIVLLEEVLQEAIDVAKNNIAEKNPNLANAEATARQVGVGAVIFHDLKNERMNNIEFDLEQMLKFEGETGPYVQYTNARAHSLLRKGGYDGTPFAGSADDHAWGVVSMLNQFSTVIDRAFTRREPSIISRYVLDLAQSFNKYYGHVRVLEDDAAKQSRLALVKSVTIVLTEGLRLLGVGAPEEM

SEQ ID NO: 247 - protein, 185 aa, Exiguobacterium sp.
  source 1..185: note = SBI00449_Protein GrpE
MEEKEQNQNLQQEENVTEPTETVEVTEEEVIQADLVEDEKPDFEAQLAEAKASELRLRADFENFKRRNRVEAENRAKYSSQAIVEKLLPLVDNLDRALQIETENDETKSVLTGVEMVKRQLVETLQNEGVVEIPAVGEAFDPNLHQAVVQEASEEHESGIVIAEFQKGYKLHDRVIRPSMVKVAE

SEQ ID NO: 248 - protein, 369 aa, Exiguobacterium sp.
  source 1..369: note = SBI00449_protein NusA
MGPQLLEAINQIAKEKEIDKNIIIDALEQALISAYRRNFGKESEAVKVEFDQQTGDIRVFALKEVVERLTQPEEQLSLEEAHEIDPTYELGDFHKVEVTPGDFGRVAAQTAKQIVTQKMREAERERIYNHFADREDEIMTGIVERQDARNLYVNLEGIEAVLTTHEQMPNERFGIRDRIKVYVTKVDPMVKGSGASILVSRTHPGLLKRLFEIEVPEISSGEVEVKSVAREAGDRSKIAVAADDIDPVGACVGQKGARVQRIVNDLNGEKIDIVRYSDDPKEYVANALSPAQVVAVYVNEPAKATIVVVPDFQLSLAIGKRGQNARLAAKLTGWKIDIKSESEAEAMDLEDVFATEEPAVEAVQVEGEE

SEQ ID NO: 249 - protein, 394 aa, Bacillus safensis
  source 1..394: note = SBI00461_ Phosphoglycerate kinase
MNKKSVKDIDVKGKVVFCRVDFNVPMKDGEVTDDTRIRAALPTIEYLTGQGAKVLLASHLGRPKGQVTEELRLTPVAKRLQELLGKEVKKADEAYGDNVKKQISDLKEGDVLVLENVRFYPGEEKNDPELSKAFADLADVYVNDAFGAAHRAHASTAGIAAYLPAVSGFLMQKELEVLGKAISNPDRPFTAIIGGAKVKDKIGVIESLLDKVDNLIIGGGLAYTFVKALGHEVGKSLLEEDKVDLAKSFMDRAKEKGVNFLIPTDVLVADDFSNDANTSIVPISEIPSDQEALDIGTETREKYADVIKNSKLVVWNGPMGVFEIDAFAKGTKAIAEALAEAKDTYSVIGGGDSAAAVEKFGLADQMSHISTGGGASLEFMEGKELPGVTALNDK

SEQ ID NO: 250 - protein, 132 aa, Bacillus safensis
  source 1..132: note = SBI00461_30S ribosomal protein S8
MVMTDPIADLLTRIRNANMVRHEKLEVPASKIKREIAEILKREGFIRDVEYVEDSKQGIIRLFLKYGQNNERVITGLKRISKPGLRVYAKSNEVPRVLNGLGIAIISTSQGVLSDKEARAKQAGGEVLAYVW

SEQ ID NO: 251 - protein, 166 aa, Bacillus safensis
  source 1..166: note = SBI00461_50S ribosomal protein L10
MSNAIDTKKVVVDEITSKFKDSMSTVIVDYRGLSVSEVTELRKQLREAGVEFKVYKNTLTRRAVEQVELTGLNDFLTGPNAIAFSNEDVIAPAKIINEFAKSHEALEIKAGVIEGNVATVEEVKALAELPSREGLLSMLLSVLQAPVRNLALATKAVADQKEEQGA

SEQ ID NO: 252 - protein, 95 aa, Bacillus safensis
  source 1..95: note = SBI00461_50S ribosomal protein L23
MKDPRDVLKRPIITERSADLMTEKKYTFEVDVRANKTEVKDAVEEIFGVKVEKVNVQNYKGKSKRVGRYTGMTSRRRKAIVKLTADSKEIEIFEA

SEQ ID NO: 253 - protein, 557 aa, Bacillus safensis
  source 1..557: note = SBI00461_Arginine--tRNA ligase
MNIAEQVKDALKEEIIAAVVKAGLADESQVPDVLLEVPKDKTHGDYSTNMAMQLARIAKKAPRQIAEDIVNAFDKGKASIEKLDIAGPGFINFYMNNQYLTKLIPAVLEAKEAYGETNTGGGQKVQVEFVSANPTGDLHLGHARGAAVGDSLCNILDKAGFDVSREYYINDAGNQINNLALSVEVRYFEALGLEKEMPEDGYRGEDIKGIGQKLADEFGDRFVHEPEEERMKFFREYGLKYELEKLRVDLENFRVPFDVWYSETSLYENGKIEPALETLRAKGYVFEEDGATWLRSTDFGDDKDRVLIKKDGSFTYLLPDIAYHKDKLDRGFDQLINIWGADHHGYIPRMKAAIQALGYPADKLEVEIIQLVHLYKNGEKMKMSKRTGKAVTMRDLIEEVGLDATRYFFAMRSAATHMDFDLDLAISTSNENPVYYAQYAHARICSMLRQGEEKGYEPNLEKADFSHIQSEKEYDLLKIIGSFPEVVAEAAEKRIPHRVTNYIYDLASTLHSFYNAEKVIDAENETKTTARLSLMKATQITLANALKLIGVSAPEKM

SEQ ID NO: 254 - protein, 185 aa, Bacillus safensis
  source 1..185: note = SBI00461_Protein GrpE
MSEEKQTPEQEAEVEAQEEAVQADTEEVTNDEQSAFQEKIDELQQLLDEKENKILRVQADFENYKRRARTEVETVQKYRSQHVVSDLLPALDNFERALGIDPDNEQTKSLLEGMQMVYRQLVEALKNEGVEPIEAVGKEFDPNLHQAVMQVEDENYDSNIVVEELQKGYKLKDRVIRPSMVKVNQ

SEQ ID NO: 255 - protein, 371 aa, Bacillus safensis
  source 1..371: note = SBI00461_protein NusA
MSSELLDALTVLEKEKGISKEIIIEAIEAALISAYKRNFNQAQNVRVDLNRETGTIRVFARKDVVDEVYDSRLEISVDDAANINPNYMVGDVVEIEVTPKDFGRIAAQTAKQVVTQRVREAERGVIYTEFIDREEDIMTGIVQRIDSKFIYVSLGKIEALLPVNEQMPNEEYKPHDRIKVFITKVEKTTKGPQIYVSRTHPGLLKRLFEIEVPEIYDGTVELKSVAREAGDRSKISVRTDDPDVDPVGSCVGPKGQRVQAIVNELKGEKIDIVHWSNDPVEFVANALSPSKVLDVIVNEEDKATTVIVPDYQLSLAIGKRGQNARLAAKLTSWKIDIKSETDARELGIFPRTEDSESLFLEAEPVAEESDE

SEQ ID NO: 256 - protein, 394 aa, Bacillus atrophaeus
  source 1..394: note = SBI00550_ Phosphoglycerate kinase
MNKKTLKDIDVKGKVVFCRVDFNVPMKDGEVTDDTRIRAALPTIKHLADQGAKVLLASHLGRPKGEVVEELRLTPVAARLGELLGKEVKKADEAYGDAVQAQISDMKDGDVLVLENVRFYPGEEKNDPELSKAFAALADVYVNDAFGAAHRAHASTAGIAEHLPAVAGFLMEKELDVLGKAVSNPERPFTAIIGGAKVKDKIGVIESLLDKVDNLIIGGGLAYTFVKALGYEVGKSLLEEDKIELAKTFMDRAKEKGVNFYMPEDVLVADDFSNDANTKIVPISEIPSDLEAIDIGTKTRETYADVIKNSKLVVWNGPMGVFEIDLFAQGTKAVAEALAEAKDTYSVIGGGDSAAAVEKFGLADKMSHISTGGGASLEFMEGKELPGVSALNDK

SEQ ID NO: 257 - protein, 132 aa, Bacillus atrophaeus
  source 1..132: note = SBI00550_30S ribosomal protein S8
MVMTDPVADMLTRIRNANMVRHEKLEIPASKLKREIAEILKREGFVRDVEFVEDSKQGIIRVFLKYGQNNERVITGLKRISKPGLRVYAKSNEVPRVLNGLGIAILSTSQGVLTDKEARAKQAGGEVLAYVW

SEQ ID NO: 258 - protein, 166 aa, Bacillus atrophaeus
  source 1..166: note = SBI00550_50S ribosomal protein L10
MSSAIETKKVVVEEIASKLKESKSTIIVDYRGLSVAEVTELRKQLREANVEFKVYKNSMTRRAVEQVELTGLNDVLTGPNAIAFSTEDVIAPAKVINEFAKTHEALEIKAGVIEGNVSTVEEVKALAELPSRDGLLSMLLSVLQAPVRNLALATKAVAEQKEEQGA

SEQ ID NO: 259 - protein, 95 aa, Bacillus atrophaeus
  source 1..95: note = SBI00550_50S ribosomal protein L23
MKDPRDVLKRPVITERSADLMTDKKYTFEVDVRANKTEVKDAVESIFGVKVDKVNIMNYKGKSKRVGRYSGMTSRRRKAIVKLTADSKEIEIFEA

SEQ ID NO: 260 - protein, 556 aa, Bacillus atrophaeus
  source 1..556: note = SBI00550_Arginine--tRNA ligase
MNIAEQMKDVLKEEIKAAVLKAGLAEESQIPKVILETPKDKTHGDYSTNMAMQLARIAKKAPRQIAEDIVASFDKGKASIEKLDIAGPGFINFYMDNQYLTKLIPSVLEAGEAYGETNIGNGERIQVEFVSANPTGDLHLGHARGAAVGDSLCNVLAKAGYDVSREYYINDAGNQINNLALSVEVRYFEALGLEKEMPEDGYRGEDIIAIGKRLAEEYGDRFVKEEESERQKFFREYGLKYELEKLRVDLENFRVPFNVWYSETSLYENGKIDKALEALRKQGHVYEEDGATWFRSTTFGDDKDRVLIKKDGTYTYLLPDIAYHKDKLDRGFDKLINVWGADHHGYIPRMKAAIEALGYQKGTLEVEIIQLVHLYKNGEKMKMSKRTGKAVTMRDLIEEVGLDAVRYFFAMRSADTHMDFDLDLAVSTSNDNPVYYAQYAHARICSMLRQGEEQGLTPAADLDFSAVNSEKEYDLLKTIGGFPEAVAEAAEKRIPHRVTNYIYDLASSLHSFYNAEKVIDPENEEKSRARLALMKATQITLNNALQLIGVSAPEKM

SEQ ID NO: 261 - protein, 187 aa, Bacillus atrophaeus
  source 1..187: note = SBI00550_Protein GrpE
MSEEKQTTEQNEAEEQEVMEEQAAAEEQQEETNEGELLQNQINELQGLLDEKENKILRVQADFENYKRRSRLEMEASQKYRSQNIVTDLLPALDSFERALQVEADNEQTKSLLQGMEMVHRQLVDALKNEGVEAIEAVGQEFDPNLHQAVMQVEDENYGSNIVVEEMQKGYKLKDRVIRPSMVKVNQ

SEQ ID NO: 262 - protein, 372 aa, Bacillus atrophaeus
  source 1..372: note = SBI00550_protein NusA
MSSELLDALTILEKEKGISKDIIIEAIEAALISAYKRNFNQAQNVRVDLNRETGTIRVFARKDVVDEVYDPRLEISIDDAHAIDPNYVVGDVVEIEVTPKDFGRIAAQTAKQVVTQRVREAERGVIYTEFIDREEDIMTGIVQRLDNKFIYVSLGKIEALLPVNEQMPNESYKPHDRIKVFITKVEKTTKGPQIYVSRTHPGLLKRLFEIEVPEIYDGTVELKSVAREAGDRSKISVRTDDPDVDPVGSCVGPKGQRVQAIVNELKGEKIDIVNWSNDPVEFVANALSPSKVLDVIVNEEEKATTVIVPDYQLSLAIGKRGQNARLAAKLTSWKIDIKSETDARELGIYPRELEEDLDEPLFTEPESAESDE

SEQ ID NO: 263 - protein, 394 aa, Bacillus intestinalis
  source 1..394: note = SBI00553_ Phosphoglycerate kinase
MNKKTLKDIDVKGKVVFCRVDFNVPMKDGEVTDDTRIRAALPTIKHLAEQGAKVLLASHLGRPKGEVVEELRLTPVAARLGELLGKEVKKADEAYGDAVKAQISDMKDGDVLVLENVRFYPGEEKNDPELAKAFAELADVYVNDAFGAAHRAHASTAGIAEHLPAVAGFLMEKELDVLGKAVSNPDRPFTAIIGGAKVKDKIGVIESLLDKVDNLIIGGGLAYTFVKALGHEVGKSLLEEDKIELAKSFMDRAKEKGVNFYMPEDVLVADDFSNDANVKIVPISEIPSDLEAIDIGTKTRETYADVIKNSKLVVWNGPMGVFEIDLFAQGTKAVAEALAEAKDTYSVIGGGDSAAAVEKFGLADKMSHISTGGGASLEFMEGKELPGVAALNDK

SEQ ID NO: 264 - protein, 132 aa, Bacillus intestinalis; identical to SEQ ID NO: 180
  source 1..132: note = SBI00553_30S ribosomal protein S8

SEQ ID NO: 265 - protein, 166 aa, Bacillus intestinalis; identical to SEQ ID NO: 181
  source 1..166: note = SBI00553_50S ribosomal protein L10

SEQ ID NO: 266 - protein, 95 aa, Bacillus intestinalis; identical to SEQ ID NO: 182
  source 1..95: note = SBI00553_50S ribosomal protein L23

SEQ ID NO: 267 - protein, 556 aa, Bacillus intestinalis
  source 1..556: note = SBI00553_Arginine--tRNA ligase
MNIAEQMKDVLKEEIKAAVLKAGLAEESQIPNVVLETPKDKTHGDYSTNMAMQLARIAKKAPRQIAEEIVSHFDKGKASIEKLDIAGPGFINFYMNNQYLTKLIPSVLEAGEAYGETNIGNGERVQVEFVSANPTGDLHLGHARGAAVGDSLCNVLSKAGYDVSREYYINDAGNQINNLALSVEVRYFEALGLEKPMPEDGYRGEDIIAIGKRLAEEYGDRFVNEEESERRAFFREYGLKYELEKLRKDLENFRVPFDVWYSETSLYQNGKIDKALEAIREKGHVYEEDGATWFRSTTFGDDKDRVLIKKDGTYTYLLPDIAYHKDKLDRGFDKLINVWGADHHGYIPRMKAAIEALGYEKGTLEVEIIQLVHLYKNGEKMKMSKRTGKAVTMRDLIEEVGLDAVRYFFAMRSADTHMDFDLDLAVSTSNENPVYYAQYAHARICSMLRQGEEQGLKPAADLDFSHIQSEKEYDLLKTIGGFPEAVAEAAEKRIPHRVTNYIYDLASSLHSFYNAEKVIDPENEEKSRARLALMKATQITLNNALQLIGVSAPEKM

SEQ ID NO: 268 - protein, 187 aa, Bacillus intestinalis; identical to SEQ ID NO: 184
  source 1..187: note = SBI00553_Protein GrpE

SEQ ID NO: 269 - protein, 371 aa, Bacillus intestinalis
  source 1..371: note = SBI00553_protein NusA
MSSELLDALTILEKEKGISKEIIIEAIEAALISAYKRNFNQAQNVRVDLNRETGSIRVFARKDVVDEVYDQRLEISIEEAQGIHPEYMVGDVVEIEVTPKDFGRIAAQTAKQVVTQRVREAERGVIYSEFIDREEDIMTGIVQRLDNKFIYVSLGKIEALLPVNEQMPNESYKPHDRIKVYITKVEKTTKGPQIYVSRTHPGLLKRLFEIEVPEIYDGTVELKSVAREAGDRSKISVRTDDPDVDPVGSCVGPKGQRVQAIVNELKGEKIDIVNWSSDPVEFVANALSPSKVLDVIVNEEEKATTVIVPDYQLSLAIGKRGQNARLAAKLTGWKIDIKSETDARELGIYPRELEEEDEPLFTEPETAESDE

SEQ ID NO: 270 - protein, 393 aa, Paenibacillus sp.
  source 1..393: note = SBI00556_ Phosphoglycerate kinase
MNKKSVRDVEVKGKRVFVRVDFNVPLENGAITDDTRVRETLPTINYLVEQGAKVILASHMGRPKGEVVDSMRLTPAAVRLGELLGKPVKKLDESIGENVKAEIAKMENGDVIVLENVRFHKGEEKNDPELAKAFAELADLFVNDAFGAAHRAHASTEGIAHHLPAVSGLLMEKELNVLSKALTNPERPFTAIVGGSKVKDKIDVINKMLEIADNIVIGGGLTYTFFKAQGNEIGKSLVDNEKLDVALGFIEKAKELGKNLYLPVDIVVTDDFSADANTQVVAIDSIPAEWEGIDIGPKTREIYADVIKNSKLVVWNGPMGVFEIEPFSHGTRAVAEACAETAGYTIIGGGDSAAAVEKFKLKDKMDHISTGGGASLEFMEGKALPGVVALNDK

SEQ ID NO: 271 - protein, 132 aa, Paenibacillus sp.
  source 1..132: note = SBI00556_30S ribosomal protein S8
MVMSDPIADMLTRIRNANTVRHETVEMPASTMKKQIAEILKREGFIRDAEYIDDNKQGIIRVFLKYGANNERVITGLKRISKPGLRVYTKANEVPRVLGGLGIAIISTSKGVMTDKEARQSKSGGEVICYVW

SEQ ID NO: 272 - protein, 167 aa, Paenibacillus sp.
  source 1..167: note = SBI00556_50S ribosomal protein L10
MANAKVIEAKQQAVQDIAEKFRSSATTVVADYRGLTVSQVTELRKQLREAGIEFQVLKNTLVRRATAEAELSELDEVLSGPTAIAFSREDAVAPAKILNDFAKKNEALEIKGGVVEGRVVDVDQIKALAALPSREGLLSMLLSVLQAPMRNFALAVKAVAEKNEAEA

SEQ ID NO: 273 - protein, 96 aa, Paenibacillus sp.
  source 1..96: note = SBI00556_50S ribosomal protein L23
MKDPRDIIKRPVITERTADMMNDLKYVFEVDMRANKTEIKLAVEQIFKVKVANVNTLRMPAKPKRYGRHSGYTSEWKKAFVTLAKDSKPLEFFETV

SEQ ID NO: 274 - protein, 558 aa, Paenibacillus sp.
  source 1..558: note = SBI00556_Arginine--tRNA ligase
MSSVMERVNNQVKQAIEDAIVQTGLVAREDIPAFVIEVPKDKTHGDLASNVAMQLTRIAKRNPRQIAEAIIENLNKEAASIESAEIAGPGFINFRVNKSYLYDILHEVNEKGSDYGRIAAGSGQRVQVEFVSANPTGSLHLGHARGAAVGDALCNLLDYAGYEVTREYYINDAGNQVNNLAKSIECRYKQALGQDAEMPEDGYHGVDIKGFAEELVQAESDRLLSLSEEERERYFRTYGLSKELDKIKRDLNRFRVPFDVWFSETSLYENNEVTKALDALRASGHVFEHEGATWLRTTTFGDDKDRVLVKNDGSYTYLTPDISYHMDKYGRGFDKMINIWGADHHGYIPRMKAAMEALGNDPDKLVVLIAQMVSLFQDGEKVKMSKRTGKAVTMEDLMDEVGVDAIRYFFTMRSMDSHLDFDMDLAISTSNENPVYYVQYAHARICSIYRQAEEQGVALQPLNELNLAKLTAEHEFDLLRKLGELPEEIAVAARDYAPHRLIRYVYELASLFHSYYRAERVITEDAEQTQARLALLGAVRTTIANVLRLVGVSAPEQM

SEQ ID NO: 275 - protein, 201 aa, Paenibacillus sp.
  source 1..201: note = SBI00556_Protein GrpE
MNPEKEENIATETMNEEAAQAAHNHTEDIPAADNATADSSEGNTSSSEGAVEDAELAKAKAEAEEYQQRFLRAQADFDNFRRRTLKEKEDLAKYASAKLVTELLPVLDNFERALATEQAASEAESFIKGVDMIFRQLGQVLEQEGVKPMEAVGQPFNPEFHQAVMTVETDEFEEGTVVEELQKGYLLKDKVLRPAMVKVSG

SEQ ID NO: 276 - protein, 365 aa, Paenibacillus sp.
  source 1..365: note = SBI00556_protein NusA
MSMDFIDALSEIEREKGISKEVLIDAIEAALISSYKRNFNTAQNVRVDINRATGVIKVYARKNVVDEVLDPRLEISLHAAREHNPNYQMDDICEIEVTPRDFGRIAAQTAKQVVTQRIREAERGLIYNAFIDKSDDIVTGIVQRQDMRNVYVDLGKVEAVLPLNELMPNEKFKHGDRTKAYITKVENTTKGPQIILSRTHPGLLKRLFELEVPEIFDGVVEIKSVAREAGQRSKIAVYSRNEEVDPVGSCVGPKGMRVQTIVNELRGEKIDIVRWSEDVSEYVANALSPSKVVDVEVREAEKMARVIVPDYQLSLAIGIKGQNARLAAKLTGWKIDIKSETQADEEGLPMSSDEQTPDDSMEVSE

SEQ ID NO: 277 - protein, 394 aa, Bacillus subtilis
  source 1..394: note = SBI00564_ Phosphoglycerate kinase
MNKKTLKDIDVKGKVVFCRVDFNVPMKDGEVTDDTRIRAALPTIKHLADQGAKVLLASHLGRPKGEVVEELRLTPVAARLGELLGKEVKKADEAYGDAVKAQISEMKDGDVLVLENVRFYPGEEKNDPELAKAFAELADVYVNDAFGAAHRAHASTAGIAEHLPAVAGFLMEKELDVLGKAVSNPDRPFTAIIGGAKVKDKIGVIESLLDKVDNLIIGGGLAYTFVKALGYEVGKSLLEEDKIELAKSFMDRAKEKGVNFYMPEDVLVADDFSNDANVKIVPISEIPSDLEAIDIGTKTRETYADVIKNSKLVVWNGPMGVFEIDLFAQGTKAVAEALAEAKDTYSVIGGGDSAAAVEKFGLADKMSHISTGGGASLEFMEGKELPGVAALNDK

SEQ ID NO: 278 - protein, 132 aa, Bacillus subtilis; identical to SEQ ID NO: 180
  source 1..132: note = SBI00564_30S ribosomal protein S8

SEQ ID NO: 279 - protein, 166 aa, Bacillus subtilis
  source 1..166: note = SBI00564_50S ribosomal protein L10
MSSAIETKKVVVEEIASKLKESKSTIIVDYRGLNVSEVTELRKQLREANVEFKVYKNTMTRRAVEQAELNGLNDFLTGPNAIAFSTEDVVAPAKVLNDFAKNHEALEIKAGVIEGKVSTVEEVKALAELPSREGLLSMLLSVLQAPVRNLALAAKAVAEQKEEQGA

SEQ ID NO: 280 - protein, 95 aa, Bacillus subtilis
  source 1..95: note = SBI00564_50S ribosomal protein L23
MKDPRDVLKRPVITERSADLMTEKKYTFEVDVRANKTEVKDAVESIFGVKVDKVNIMNYKGKSKRVGRYTGMTSRRRKAIVKLTADSKEIEIFEA

SEQ ID NO: 281 - protein, 556 aa, Bacillus subtilis
  source 1..556: note = SBI00564_Arginine--tRNA ligase
MNIAEQMKDVLKEEIKAAVLKAGLAEESQIPNVVLETPKDKTHGDYSTNMAMQLARVAKKAPRQIAEEIVAHFDKGKASIEKLDIAGPGFINFYMNNQYLTKLIPSVLEAGEAYGETNIGNGERVQVEFVSANPTGDLHLGHARGAAVGDSLCNVLSKAGYDVSREYYINDAGNQINNLALSVEVRYFEALGLEKPMPEDGYRGEDIIAIGKRLAEEYGDRFVNEEESERLAFFREYGLKYELEKLRKDLENFRVPFDVWYSETSLYQNGKIDKALEALREKGHVYEEDGATWFRSTTFGDDKDRVLIKKDGTYTYLLPDIAYHKDKLDRGFDKLINVWGADHHGYIPRMKAAIEALGYEKGTLEVEIIQLVHLYKNGEKMKMSKRTGKAVTMRDLIEEVGLDAVRYFFAMRSADTHMDFDLDLAVSTSNENPVYYAQYAHARICSMLRQGEEQGLKPAADLDFSHIQSEKEYDLLKTIGGFPEAVAEAAEKRIPHRVTNYIYDLASALHSFYNAEKVIDPENEEKSRARLALMKATQITLNNALQLIGVSAPEKM

SEQ ID NO: 282 - protein, 187 aa, Bacillus subtilis
  source 1..187: note = SBI00564_Protein GrpE
MSEEKQTVEQNETEEQEIIEEQAAADEQQEETNESELLQNQINELQGLLEEKENKLLRVQADFENYKRRSRLEMEASQKYRSQNIVTDLLPALDSFERALQVEADNEQTKSLLQGMEMVHRQLVEALKKEGVEAIEAVGQEFDPNLHQAVMQAEDENYDSNIVVEEMQKGYKLKDRVIRPSMVKVNQ

SEQ ID NO: 283 - protein, 371 aa, Bacillus subtilis
  source 1..371: note = SBI00564_protein NusA
MSSELLDALTILEKEKGISKEIIIEAIEAALISAYKRNFNQAQNVRVDLNRETGSIRVFARKDVVDEVYDQRLEISIEEAQGIHPEYMVGDVVEIEVTPKDFGRIAAQTAKQVVTQRVREAERGVIYSEFIDREEDIMTGIVQRLDNKFIYVSLGKIEALLPVNEQMPNESYKPHDRIKVYITKVEKTTKGPQIYVSRTHPGLLKRLFEIEVPEIYDGTVELKSVAREAGDRSKISVRTDDPDVDPVGSCVGPKGQRVQAIVNELKGEKIDIVNWSSDPVEFVANALSPSKVLDVIVNEEEKATTVIVPDYQLSLAIGKRGQNARLAAKLTGWKIDIKSETDARELGIYPRELEEDDEPLFTEPETAESDE

SEQ ID NO: 284 - protein, 394 aa, Psychrobacillus sp.
  source 1..394: note = SBI00568_ Phosphoglycerate kinase
MKVKQAMSDIALQGKRVFCRVDFNVPMEDGAITDDTRIRAALPTINYIIEQGAKVILASHMGRPKGEVKEELRLTKVGEHLAKLLDKPVNKLDESIGETVENTVSAMKDGDIVLLENVRFHAGEEKNDAELAKSFAKLADVYVNDAFGAAHRAHATTEGIAKLLPAVSGLLMQKELDVLGKALAEPERPFTAIIGGAKVKDKIGVIDHLLDKVDNILIGGGLSYTFTKAQGHDIGTSLLEEDKIDLAKGFLEKAKEKGVSFYLPVDVVVADDFSKDANTKVVDIDQIPSDWMGLDIGPKTRELYADVIKNSKLIIWNGPMGVFEMDAFANGTKAVANAMAETAGYTIIGGGDSAAAVEKFEVGEKMDHISTGGGASLEFMEGKDLPGVSALNDK

SEQ ID NO: 285 - protein, 132 aa, Psychrobacillus sp.
  source 1..132: note = SBI00568_30S ribosomal protein S8
MTMSDPIADMLTRIRNANMVRHEKLEVPASNLKKEIAEILKREGFIRDVEYVEDSKQGIIRIFLKYGQNDERVITGLKRISKPGLRVYAKTNEVPKVLNGLGIALVSTSNGLLTDKEARAKQVGGEIVAYVW

SEQ ID NO: 286 - protein, 166 aa, Psychrobacillus sp.
  source 1..166: note = SBI00568_50S ribosomal protein L10
MNKAIETKKVQVQEIAEKFKAAASVVVVDYRGLNVAQVTELRKQLREAGVEFKVYKNSLTRRATEVAGVDGINESLVGPNAVAFSNEDVVAPAKIINDFAKKNEQLEIKVGIIEGTVASAEDVKALAELPSREGLLSMLLSVLQAPMRNFALATKAVAEQKEEQGA

SEQ ID NO: 287 - protein, 94 aa, Psychrobacillus sp.
  source 1..94: note = SBI00568_50S ribosomal protein L23
MEARDIIKRPVITERSSEVMADKKYTFEVDTRANKTQVKYAIEEIFGVDVEKVNIMNYKGKYKRVGKFGGYTNKRRKAIVTLTLESKEIELFEI

SEQ ID NO: 288 - protein, 559 aa, Psychrobacillus sp.
  source 1..559: note = SBI00568_Arginine--tRNA ligase
MNLTEQIANVISNALENEWTVRQVEPLLKKPKQTELGDIAFPCFTLAKKLRKAPQQIALELSTKLEDKLIASVQVVGGYVNIFFNRTLVTKQVLQSITMDQQQYGSKNKKQEKIVIDFSSPNIAKPFSMGHLRSTVIGNALANIAEKNGYEAIRINHLGDWGTQFGKLIVAYKLWGNKEKILAAPIEELLKIYVHFHNMAEKDDSLNEQARAAFKLLEEGDEEALSLWKSFKEASLKEFQIIYELLGVHFDSYAGEAFYNDKMTNIVDDLKEKGLLIESEGAFVVELEDMPPSLITKKDGATLYATRDLAAAIYRHQTYHASKTFYVVGNEQTLHFKQLFSVLQKMGYKWANQLEHVPFGMMLKDGKKMSTRKGKVILLADVIADAIKTAEHNINEKNPTLENKEEVAKQVGIGAVIFNDLKNDRMNDIDFSLEQMLNFEGETGPYVQYTNARICSLLQKGNFEAEGFNFLPLGVEAWPIIQLLEDFPRVIEKAFDHADPSQIAKFSLLLARQFNKYYTSTKILVDDGTASSKLTFAFSVSVVLQESLRLLGVSAPKKM

SEQ ID NO: 289 - protein, 180 aa, Psychrobacillus sp.
  source 1..180: note = SBI00568_Protein GrpE
MAEIKDENLEEQEVKENTQEEPEQVEEVVEEVDELTLAKQQLDEEQDKLIRLRADFENYKRRVQLDKASDFKYRAQSVLMDILPVLDNFERALAVETTSEEAASIVKGVDMVYRTLLEAVKKEGLEQIEAEGVTFDPNFHQAVMQEQDDSKETGIVLQELQKGYKLKDRVLRPSMVKVNE

SEQ ID NO: 290 - protein, 377 aa, Psychrobacillus sp.
  source 1..377: note = SBI00568_protein NusA
MSSELLDALTALEQQKGISRDVLIEAIEAALVTAYKRNFNQAQNVRVDINLATGTMLVYSRKDVVEEVADDRLQISLEDARVINPHYAIGDVVEEEVTPRNFGRIAAQTAKQVVTQRVREAERGLIYEEYVDREDDIVNGIVERLDARNIYVGLGKVEAVLPANEQIQTETYRPHERIKVYITKVERTTRGPQVFVSRTHPGLLRRLFEMEVPEIFEGIVEIKSIAREAGDRSKISVFAHNDEIDPVGSCVGAKGARVQTIVNELSGEKIDIVEWSEDPVVFVANALSPSKVIDVQVNEEEKSTTVVVPDYQLSLAIGKRGQNARLAAKLTGWKIDIKSETDARELGIYPNENSPQLIIENLDEEELDDFDFYKEEE

SEQ ID NO: 291 - protein, 394 aa, Bacillus axarquiensis
  source 1..394: note = SBI00589_ Phosphoglycerate kinase
MNKKTLKDIDVKGKVVFCRVDFNVPMKDGEVTDDTRIRAALPTIKHLADQGAKVLLASHLGRPKGEVVEELRLTPVAARLGELLGKEVKKADEAYGDAVKSQISDMKDGDVLVLENVRFYPGEEKNDPELAKAFAELADVYVNDAFGAAHRAHASTAGIAKHLPAVAGFLMEKELDVLGKAVSNPDRPFTAIIGGAKVKDKIGVIESLLDKVDNLIIGGGLAYTFVKALGHEVGKSLLEEDKIELAKSFMDRAKEKGVNFYMPEDVLVADDFSNDANVKMVPISEIPSDLEAIDIGTKTRETYADVIKNSKLVVWNGPMGVFEIDLFAQGTKAVAEALAEAKDTYSVIGGGDSAAAVEKFGLADKMSHISTGGGASLEFMEGKELPGVAALNDK

SEQ ID NO: 292 - protein, 132 aa, Bacillus axarquiensis
  source 1..132: note = SBI00589_30S ribosomal protein S8
MVMTDPIADMLTRIRNANMVRHEKLEIPASKLKREIAEILKREGFIRDVEFVEDSKQGIIRVFLKYGQNNERVITGLKRISKPGLRVYAKSNEVPRVLNGLGIAILSTSHGVLTDKEARAKQAGGEVLAYVW

SEQ ID NO: 293 - protein, 166 aa, Bacillus axarquiensis
  source 1..166: note = SBI00589_50S ribosomal protein L10
MSSAIETKKVVVEEIASKLKESKSTIIVDYRGLNVSEVTELRKQLREANVEFKVYKNTMTRRAVEQAELDGLNDVLTGPNAIAFSTEDVVAPAKVLNEFAKQHEALEIKAGVIEGKVSTVEEVKALAELPSREGLLSMLLSVLQAPVRNLALAAKAVADQKEEQGA

SEQ ID NO: 294 - protein, 95 aa, Bacillus axarquiensis; identical to SEQ ID NO: 182
  source 1..95: note = SBI00589_50S ribosomal protein L23

SEQ ID NO: 295 - protein, 556 aa, Bacillus axarquiensis
  source 1..556: note = SBI00589_Arginine--tRNA ligase
MNIAEQMKDVLKEEIKAAVLKAGLAEESQIPNVILETPKDKTHGDYSTNMAMQLARIAKKAPRQIAEEIVATFDKGKASIEKLDIAGPGFINFYMNNQYLTKLIPSVLEAGDAYGETNIGNGERVQVEFVSANPTGDLHLGHARGAAVGDSLCNVLAKAGYDVSREYYINDAGNQINNLALSVEVRYFEALGLEKPMPEDGYRGEDIISIGKRLAEEYGDRFVNEEESERLAFFREYGLKYELEKLRVDLENFRVPFDVWYSETSLYQNGKIDKALDALREKGHVYEEDGATWFRSTTFGDDKDRVLIKKDGTYTYLLPDIAYHKDKLDRGFDKLVNVWGADHHGYIPRMKAAIEALGYEKGTLEVEIIQLVHLYKNGEKMKMSKRTGKAVTMRDLIDEVGLDAVRYFFAMRSADTHMDFDLDLAVSTSNENPVYYAQYAHARICSMLRQGEEQGLKPAADLDFSPIQSEKEYDLLKTIGGFPEAVAEAAEKRIPHRVTNYIYDLASALHSFYNAEKVIDPENEEKSRARLALMKATQITLNNALQLIGVSAPEKM

SEQ ID NO: 296 - protein, 187 aa, Bacillus axarquiensis
  source 1..187: note = SBI00589_Protein GrpE
MSEEKQTAEQNETEEQEVIEEQAAAEEQQEETNESELLQNQINELQGLLEEKENKLLRVQADFENYKRRSRLEMEASQKYRSQNIVTELLPALDSFERALQVEADNEQTKSLLQGMEMVHRQLVEALNKEGVEAIEAVGQEFDPNLHQAVMQADDENYGSNIVVEEMQKGYKLKDRVIRPSMVKVNQ

SEQ ID NO: 297 - protein, 372 aa, Bacillus axarquiensis
  source 1..372: note = SBI00589_protein NusA
MSSELLDALTILEKEKGISKEIIIEAIEAALISAYKRNFNQAQNVRVDLNRETGTIRVFARKDVVDEVYDQRLEISIEEAQSIHPEYMVGDVVEIEVTPKDFGRIAAQTAKQVVTQRVREAERGVIYSEFIDREEDIMTGIVQRLDNKFIYVSLGKIEALLPVNEQMPNESYKPHDRIKVYITKVEKTTKGPQIYVSRTHPGLLKRLFEIEVPEIYDGTVELKSVAREAGDRSKISVRTDDPDVDPVGSCVGPKGQRVQAIVNELKGEKIDIVNWSNDPVEFVANALSPSKVLDVIVNEEEKATTVIVPDYQLSLAIGKRGQNARLAAKLTGWKIDIKSETDARELGIYPRELEEDDEEPLFTEPETAESDE

SEQ ID NO: 298 - protein, 394 aa, Bacillus mojavensis
  source 1..394: note = SBI00592_ Phosphoglycerate kinase
MNKKTLKDIDVKGKVVFCRVDFNVPMKDGEVTDDTRIRAALPTIKHLADQGAKVLLASHLGRPKGEVVEELRLTPVAARLGELLGKEVKKADEAYGDAVKSQISDMKDGDVLVLENVRFYPGEEKNDPELAKAFAEIADVYVNDAFGAAHRAHASTAGIAEHLPAVAGFLMEKELDVLGKAISNPDRPFTAIIGGAKVKDKIGVIESLLDKVDNLIIGGGLAYTFVKALGYEVGKSLLEEDKIELAKTFMDRAKEKGVNFYMPEDVLVADDFSNDANVKIVPISEIPSDLEAIDIGTKTRETYADVIKNSKLVVWNGPMGVFEIDLFAQGTKAVAEALAEAKDTYSVIGGGDSAAAVEKFGLADKMSHISTGGGASLEFMEGKELPGVAALNDK

SEQ ID NO: 299 - protein, 132 aa, Bacillus mojavensis; identical to SEQ ID NO: 292
  source 1..132: note = SBI00592_30S ribosomal protein S8

SEQ ID NO: 300 - protein, 166 aa, Bacillus mojavensis
  source 1..166: note = SBI00592_50S ribosomal protein L10
MSSAIETKKVVVEEITSKLKESKSTIIVDYRGLNVSEVTELRKQLREANVEFKVYKNTMTRRAVEQAELDGLNDVLTGPNAIAFSTEDVVAPAKVINEFAKQHEALEIKAGVIEGKVSTVEEVKALAELPSREGLLSMLLSVLQAPVRNLALAAKAVADQKEEQGA

SEQ ID NO: 301 - protein, 95 aa, Bacillus mojavensis; identical to SEQ ID NO: 182
  source 1..95: note = SBI00592_50S ribosomal protein L23

SEQ ID NO: 302 - protein, 556 aa, Bacillus mojavensis
  source 1..556: note = SBI00592_Arginine--tRNA ligase
MNIAEQMKDVLKEEIKAAVLKAGLAEESQIPNVVLETPKDKTHGDYSTNMAMQLARIAKKAPRQIAEEIVTSFDKGKASIEKLDIAGPGFINFYMDNQYLTKLIPSVLEAGEAYGETNIGNGERVQVEFVSANPTGDLHLGHARGAAVGDSLCNVLAKAGYDVSREYYINDAGNQINNLALSVEVRYFEALGLEKPMPEDGYRGEDIVSIGKRIAEEYGDRFVNEEESERLAFFREYGLKYELEKLRVDLENFRVPFDVWYSETSLYQNGKIDKALDALREKGHVYEEDGATWFRSTTFGDDKDRVLIKKDGTYTYLLPDIAYHKDKLDRGFDKLVNVWGADHHGYIPRMKAAIEALGYEKGTLEVEIIQLVHLYKNGEKMKMSKRTGKAVTMRDLIDEVGLDAVRYFFAMRSADTHMDFDLDLAVSTSNENPVYYAQYAHARICSMLRQGEEQGLTPAADLDFSPIQSEKEYDLLKTIGGFPEAVAEAAEKRIPHRVTNYIYDLASALHSFYNAEKVIDPENKEKSRARLALMKATQITLNNALQLIGVSAPEKM

SEQ ID NO: 303 - protein, 187 aa, Bacillus mojavensis
  source 1..187: note = SBI00592_Protein GrpE
MSEEKQTAEQNETEEQEVIEEQAAAEEQQEETNESELLQNQINELQGLLEEKENKLLRVQADFENYKRRSRLEMEASQKYRSQNIVTELLPALDSFERALHVEADNEQTKSLLQGMEMVHRQLVEALKKEGVEAIEAVGQEFDPNLHQAVMQAEDENYGSNIVVEEMQKGYKLKDRVIRPSMVKVNQ

SEQ ID NO: 304 - protein, 372 aa, Bacillus mojavensis
  source 1..372: note = SBI00592_protein NusA
MSSELLDALTILEKEKGISKEIIIEAIEAALISAYKRNFNQAQNVRVDLNRETGSIRVFARKDVVDEVYDQRLEISIEEAQSIHPEYMVGDVVEIEVTPKDFGRIAAQTAKQVVTQRVREAERGVIYSEFIDREEDIMTGIVQRLDNKFIYVSLGKIEALLPVNEQMPNESYKPHDRIKVYITKVEKTTKGPQIYVSRTHPGLLKRLFEIEVPEIYDGTVELKSVAREAGDRSKISVRTDDPDVDPVGSCVGPKGQRVQAIVNELKGEKIDIVNWSNDPVEFVANALSPSKVLDVIVNEEEKATTVIVPDYQLSLAIGKRGQNARLAAKLTGWKIDIKSETDARELGIYPRELDEDDEEPLFTEPETAESDE

SEQ ID NO: 305 - protein, 394 aa, Bacillus mojavensis
  source 1..394: note = SBI00598_ Phosphoglycerate kinase
MNKKTLKDIDVKGKVVFCRVDFNVPMKDGEVTDDTRIRAALPTIEHLADQGAKVLLASHLGRPKGEVVEELRLTPVAARLGELLGKEVKKADEAYGDAVKSQISDMKDGDVLVLENVRFYPGEEKNDPELAKAFAELADVYVNDAFGAAHRAHASTAGIAEHLPAVAGFLMEKELDVLGKAISNPDRPFTAIIGGAKVKDKIGVIESLLDKVDNLIIGGGLAYTFVKALGYEVGKSLLEEDKIELAKTFMDRAKEKGVNFYMPEDVLVADDFSNDANVKIVPISEIPSDLEAIDIGTKTRETYADVIKNSKLVVWNGPMGVFEIDLFAQGTKAVAEALAEAKDTYSVIGGGDSAAAVEKFGLADKMSHISTGGGASLEFMEGKELPGVAALNDK

SEQ ID NO: 306 - protein, 132 aa, Bacillus mojavensis; identical to SEQ ID NO: 292
  source 1..132: note = SBI00598_30S ribosomal protein S8

SEQ ID NO: 307 - protein, 166 aa, Bacillus mojavensis; identical to SEQ ID NO: 293
  source 1..166: note = SBI00598_50S ribosomal protein L10

SEQ ID NO: 308 - protein, 95 aa, Bacillus mojavensis; identical to SEQ ID NO: 182
  source 1..95: note = SBI00598_50S ribosomal protein L23

SEQ ID NO: 309 - protein, 556 aa, Bacillus mojavensis
  source 1..556: note = SBI00598_Arginine--tRNA ligase
MNIAEQMKDVLKEEIRAAVLKAGLAEESQIPNVILETPKDKTHGDYSTNMAMQLARIAKKAPRQIAEEIVASFDKGKASIEKLDIAGPGFINFYMNNQYLTKLIPSVLEAGDAYGETNIGNGERVQVEFVSANPTGDLHLGHARGAAVGDSLCNVLAKAGYDVSREYYINDAGNQINNLALSVEVRYFEALGLEKPMPEDGYRGEDIISIGKRLAEEYGDRFVNEEESERLAFFREYGLKYELEKLRVDLENFRVPFDVWYSETSLYQNGKIDKALDALREKGHVYEEDGATWFRSTTFGDDKDRVLIKKDGTYTYLLPDIAYHKDKLDRGFDKLVNVWGADHHGYIPRMKAAIEALGYEKGTLEVEIIQLVHLYKNGEKMKMSKRTGKAVTMRDLIDEVGLDAVRYFFAMRSADTHMDFDLDLAVSTSNENPVYYAQYAHARICSMLRQGEEQGLKPAADLDFSPIQSEKEYDLLKTIGGFPEAVAEAAEKRIPHRVTNYIYDLASALHSFYNAEKVIDPENEEKSRARLALMKATQITLNNALQLIGVSAPEKM

SEQ ID NO: 310 - protein, 187 aa, Bacillus mojavensis
  source 1..187: note = SBI00598_Protein GrpE
MSEEKQTAEQNETEEQEVIEEQAAAEEQQEETNESELLQNQINELQGLLEEKENKLLRVQADFENYKRRSRLEMEASQKYRSQNIVTELLPALDSFERALQVEADNEQTKSLLQGMEMVHRQLVEALNKEGVEAIEAVGQEFDPNLHQAVMQAEDENYGSNIVVEEMQKGYKLKDRVIRPSMVKVNQ

SEQ ID NO: 311 - protein, 372 aa, Bacillus mojavensis; identical to SEQ ID NO: 297
  source 1..372: note = SBI00598_protein NusA

SEQ ID NO: 312 - protein, 394 aa, Bacillus aryabhattai
  source 1..394: note = SBI00644_ Phosphoglycerate kinase
MNKKTLKDIDVKGKRVFCRVDFNVPMKDGKVTDETRIRAAIPTIQYLVEQGAKVILASHLGRPKGEVVEELRLNAVAERLQALLGKDVAKADEAFGEEVKKTIDGMSEGDVLVLENVRFYPGEEKNDPELAKAFAELADVYVNDAFGAAHRAHASTEGIAQHIPAVAGFLMEKELDVLSKALSNPERPFTAIVGGAKVKDKIGVIDHLLDKVDNLIIGGGLSYTFIKALGHEVGKSLLEEDKIELAKSFMEKAKKNGVNFYMPVDVVVADDFSNDANIQVVSIEDIPSDWEGLDAGPKTREIYADVIKNSKLVIWNGPMGVFELDAFANGTKAVAEALAEATDTYSVIGGGDSAAAVEKFNLADKMSHISTGGGASLEFMEGKELPGVVALNDK

SEQ ID NO: 313 - protein, 132 aa, Bacillus aryabhattai
  source 1..132: note = SBI00644_30S ribosomal protein S8
MVMTDPIADLLTRIRNANMVRHEKIEVPASNIKKQIAEILKREGFVRDVEYIEDNKQGIIRIFLKYGSNNERVITGLKRISKPGLRVYAKNNEVPRVLNGLGIAIVSTSQGVLTDKEARQKQAGGEVLAYVW

SEQ ID NO: 314 - protein, 166 aa, Bacillus aryabhattai
  source 1..166: note = SBI00644_50S ribosomal protein L10
MSNVIEQKKQVVDEIAEKLQASNSIVVVDYRGLNVAEVTELRKQLREAGIEFKVYKNTLTRRAVEKLELTDLNDALVGPNAIAFGGEDVVAPAKILNNFAKEHEALEIKAGVIEGNVASVEEIKALAELPSREGLLSMLLSVLQAPIRNLALATKAVADQKEEQGA

SEQ ID NO: 315 - protein, 95 aa, Bacillus aryabhattai
  source 1..95: note = SBI00644_50S ribosomal protein L23
MKDPRDIIKRPVITERSTDLMAEKKYTFDVDVRANKTEVKDAIEKIFDVKVEKVNIMNYKGKFKRVGRYSGLTNRRRKAVVTLTQESNEIEFFEA

SEQ ID NO: 316 - protein, 556 aa, Bacillus aryabhattai
  source 1..556: note = SBI00644_Arginine--tRNA ligase
MNIVEQVQQKLKAEIQDAVVKAGLAEKAELPEVLLETPKDKTHGDYSTNMAMQLARIAKKAPRVIAEELVANFDKSKASIEKIDIAGPGFINFYMNNSYLTELIPTIVKAGEAYGQTNVGNGQKVQVEFVSANPTGDLHLGHARGAAVGDSLCNVLEKAGYDVSREYYINDAGNQINNLAYSVEARYMQALGLEKEMPADGYHGADIINIGKELAKEHGDKYVNASEEERFEFFRQYGLDYELAKLKRDLEQFRVKFDVWYSETSLYKNDKISVALETLKKQGHVYEEEGATWFRSTTFGDDKDRVLIKNDGSFTYLTPDIAYHQDKIQRGFDKLINIWGADHHGYIPRMKAAIQALGYEKDTLEVEIIQMVQLYQNGEKMKMSKRTGKAVTMRDLVEEVGLDATRYFFAMRSADTHLDFDLDLAVSQSNENPVYYAQYAHARICSILRQGEEMGIQSTSGADLSLISAEKEMELLKKIGEFPQAVAEAATKRIPHRITNYVFDLASTFHSFYNAEKVLDSDNVETSKARIELVKAVQVTLQNSLKLIGVSAPEKM

SEQ ID NO: 317 - protein, 186 aa, Bacillus aryabhattai
  source 1..186: note = SBI00644_Protein GrpE
MSNEKQVEEQNEEVVEEVQTDSAEATEAEVSEEVNPLQQENDQLKQQLEEEENRYLRLQADFDNFRRRSRLDAEAAQKYRAQSLVSDILPALDNFERALQVNTADEQTKSVLQGVEMVYRQLVEALQKEGVEAIESVGKTFDPYEHQAVMQVEDDEYEPNTVVEELQKGYKLKDKIIRPAMVKVNQ

SEQ ID NO: 318 - protein, 370 aa, Bacillus aryabhattai
  source 1..370: note = SBI00644_protein NusA
MSSELFDALVILEKEKGISKDVIIEAIEAALISAYKRNFNQAQNVRVDLNLERGSMRVFARKDVVDEVYDPRLEISVEEAQTINPNFQLDDVVEIEVTPKDFGRIAAQTAKQVVTQRVREAERGVIYSEFSDREEDIMTGIVQRQDSRFIYVSLGKIEALLPQSEQMPNEQYKPHDRIKVYITKVEKTTKGPQIYVSRTHPGLLKRLFEKEVPEIYDGTVELKSVAREAGDRSKISVHSEYAEVDPVGSCVGPKGQRVQAVVNELKGEKIDIVRWSNDPVEFVANALSPSKVVDVIVDENEKATTVIVPDYQLSLAIGKRGQNARLAAKLTGWKIDIKSQSEAEQEGMVVKNSDDMLVSQHAFDSDEDME

SEQ ID NO: 319 - protein, 394 aa, Bacillus sp.; identical to SEQ ID NO: 277
  source 1..394: note = SBI00693_ Phosphoglycerate kinase

SEQ ID NO: 320 - protein, 132 aa, Bacillus sp.; identical to SEQ ID NO: 180
  source 1..132: note = SBI00693_30S ribosomal protein S8

SEQ ID NO: 321 - protein, 166 aa, Bacillus sp.; identical to SEQ ID NO: 279
  source 1..166: note = SBI00693_50S ribosomal protein L10

SEQ ID NO: 322 - protein, 95 aa, Bacillus sp.; identical to SEQ ID NO: 280
  source 1..95: note = SBI00693_50S ribosomal protein L23

SEQ ID NO: 323 - protein, 556 aa, Bacillus sp.; identical to SEQ ID NO: 281
  source 1..556: note = SBI00693_Arginine--tRNA ligase

SEQ ID NO: 324 - protein, 187 aa, Bacillus sp.
  source 1..187: note = SBI00693_Protein GrpE
MSEEKQTVEQNETEEQEIIEEQAAADEQQEETNESELLQNQINELQGLLEEKENKLLRVQADFENYKRRSRLEMEASQKYRSQNIVTDLLPALDSFERALQVEADNEQTKSLLQGMEMVHRQLVEALKKEGVEAIEAVGQEFDPNLHQAVMQAEDENYGSNIVVEEMQKGYKLKDRVIRPSMVKVNQ

SEQ ID NO: 325 - protein, 371 aa, Bacillus sp.; identical to SEQ ID NO: 283
  source 1..371: note = SBI00693_protein NusA

SEQ ID NO: 326 - protein, 394 aa, Bacillus subtilis; identical to SEQ ID NO: 179
  source 1..394: note = SBI00714_ Phosphoglycerate kinase

SEQ ID NO: 327 - protein, 132 aa, Bacillus subtilis; identical to SEQ ID NO: 180
  source 1..132: note = SBI00714_30S ribosomal protein S8

SEQ ID NO: 328 - protein, 166 aa, Bacillus subtilis; identical to SEQ ID NO: 181
  source 1..166: note = SBI00714_50S ribosomal protein L10

SEQ ID NO: 329 - protein, 95 aa, Bacillus subtilis; identical to SEQ ID NO: 182
  source 1..95: note = SBI00714_50S ribosomal protein L23

SEQ ID NO: 330 - protein, 556 aa, Bacillus subtilis
  source 1..556: note = SBI00714_Arginine--tRNA ligase
MNIAEQMKDVLKEEIKAAVLKAGLAEESQLPNVILETPKDKTHGDYSTNMAMQLARVAKKAPRQIAEEIVAHFDKGKASIEKLDIAGPGFINFYMNNQYLTKLIPSVLEAGEAYGETNIGNGERVQVEFVSANPTGDLHLGHARGAAVGDSLCNVLSKAGYDVSREYYINDAGNQINNLALSVEVRYFEALGLEKPMPEDGYRGEDIIAIGKRLAEEYGDRFVNEEESERLAFFRDYGLKYELEKLRKDLENFRVPFDVWYSETSLYQNGKIDKALEALREKGHVYEEDGATWFRSTAFGDDKDRVLIKKDGSYTYLLPDIAYHKDKLDRGFDKLINVWGADHHGYIPRMKAAIEALGYEKGTLEVEIIQLVHLYKNGEKMKMSKRTGKAVTMRDLIEEVGLDAVRYFFAMRSADTHMDFDLDLAVSTSNENPVYYAQYAHARICSMLRQGEEQGLKPVADLDFSHIQSEKEYDLLKTIGGFPEAVAEAAEKRIPHRVTNYIYDLASSLHSFYNAEKVIDPENEEKSRARLALMKATQITLNNALQLIGVSAPEKM

SEQ ID NO: 331 - protein, 187 aa, Bacillus subtilis; identical to SEQ ID NO: 184
  source 1..187: note = SBI00714_Protein GrpE

SEQ ID NO: 332 - protein, 372 aa, Bacillus subtilis; identical to SEQ ID NO: 185
  source 1..372: note = SBI00714_protein NusA

SEQ ID NO: 333 - protein, 251 aa, Pichia membranifaciens
  source 1..251: note = SBI00817_Exoribonuclease, phosphorolytic domain 1
MSRLELFSPEGLRVDGRRFDEIRSFECSLNTHPHSSDGSAYCSQGNTKVICLVRGPSDTMTSASNSANSAGSANNNEPTISVSIIQPPYAKFERKAISKTDRRLNEISIIIKRALQQTIVKKNYARTFIEISITVLQLDGGLLPACINAATLALIDAGIAMYDYITAVNVALYDSYPLLDTNSLEESDLSFLTIGIVGDQDKINLLLMEDKIPLDKLQRLIDLGIKGCHSIRNIMDENVRKIGADLVSKNQ

SEQ ID NO: 334 - protein, 683 aa, Pichia membranifaciens
  source 1..683: note = SBI00817_Heat shock protein 70 family
MLFNKARSPLATTALFLYAVLLFVLPFAAQQHYGSGGLAHADSENYGTVIGIDLGTTYSCVGVMKNGRVEILANDQGNRITPSYVAFTDNNERLVGDAAKNQAASNPHNTVFDIKRLIGQRFSDKIIQREIKHLPYSIIDRDDRPVVKVEYNNEEKEFTAEEISAMILGKMKSIAEDYLGKKVTHAVVTVPAYFNDAQRQATKDAGVIAGLTVLRIVNEPTAAAIAYGLDKGDEEKQIIVYDLGGGTFDVSLLSIASGAFEVLATSGDTHLGGEDFDYRVVRHFIKIFKKKHSVDISENPKALAKLKREVEKAKRTLSNQMSTRIEIDSIAEGIDFSETLTRAKFEELNMELFKKTLKPVQQVLDDAKVKISEVDDIVLVGGSTRIPKVQELLEKHFNGKKISKGINPDEAVAFGAAVQAGVLSGEEGVEDIVLIDVNPLTLGIETTGGVMTTLIKRNTPIPTKKSQIFSTAVDNQNAVLIQIYEGERAMVKDNNLLGKFELTGIPPAPRGVPQIEVTFTLDSNGILKVSAVDKGTGKSNSITISNDKSRLTQEEIDRMVEEGEKYAEQDEIVRKTILAKNELENQAVSLKNQINDEDGWGAKLEDEEKETLTDAIEEALSFVEENGETASLEEFEAEKEKLLKVVNPIVSKLYGGAADGGADGYDAEDDDEDEDDDWDHDEL

SEQ ID NO: 335 - protein, 462 aa, Pichia membranifaciens
  source 1..462: note = SBI00817_NADPH-sulfite reductase
LRHITTRKLAVVGSGPSAFYTSLNILKSSSSKFQIDIFERNPSPYGLVRYGVAPDHPEVKNCIDRFEDVRDYMNKENNNGAFKYFGNVNIGKDITLKELYESYDGVLYAYGAQCAANNVKFSGSDHPAVIDSFSFVNWYNGHPEYQHLQIPLEKVKEVSVIGVGNVALDIVRILLGNVQRWEKTDISSVALAKLRESKVEKVTMLARRGILDSKFTNKELRELLEMKSEGVWFDGWNEADFKDQLQTAKLDRVNKRRVQLLQKYNGETVPKEMGTKSWEIKYLRSPVGVIVKDDELLKELLVSTSKLEKIEDTGDWKIVNEGRLEGLPTQLVILATGYECHPLPDFAELGIPFEGGKIPNENGKIVGVENSYCVGWVSNGSKGNINSTVADSMNVADTIVNDLQNKSTEKPGRSSIEKLLSQRNVKPVTWDQWNNIHSEEVRQGAALGKPYEKLDFGKMLNV

SEQ ID NO: 336 - protein, 822 aa, Pichia membranifaciens
  source 1..822: note = SBI00817_p-loop containing nucleoside triphosphate hydrolase protein
SGTSTASSVLRSLLDQHGAGTGNDRSGNSTTRTTAESLLQPSLKIVQEKPITLSNGRKLTLKPKQGHMLDIEKRAVEEAALGANKQEPVNMKNLYEKVKIKETTMRDLQKYDLQAAEMQSNVNELKKLTDLKNGNGKKGKKVNTLWTEKYRPRKFIDLIGNEKVNAGILRWLNEWNHAVKNGKLINNGLQGLDAFSDPLKRPRKKVLLIHGPPGIGKTTIAQCVCRQLGYEMQEINSSDERGGTVVKEKVKNALKMRSLSGKNVCLLLDEIDGAGGNEGGFVKVLTYLLHKDKKATEEWNSFHKFKYNKKEDILKRPIIAMCNDLGAHCLEQLKPYCEIVSFKKGSKRTIKKRLKAILINENIRDVNESLLDDLIVSLDGDIRNCINFLQFNSKDLNGRVKDSEVLWFQLLKDIFNLENKNVNNKKSKSDIFRELMTKLTNSSSDLNRINMGCFNLMLQLNDEYGSNLNKLDEVSDWLYFQDIMGKHFTMFDRDEYQAYGAITPLKFFRLFANFSDGNYYDKSQRFKYKSQENFELRRSIQDIVNKLMVHYGSNLTKQILLVNEIYMLNYIIIPNVDKNKSIKEFEHDKSGKICKILKIMESLDIKVEMGALKNNGRFKNSYITYNKLQPDIVIGLIDPNCVADKPNRNGENGVDNDYDNDQGNNVNEIRAMPYIKVFESVLRLSQQRELRELKRLQELGDDEDGDEDDGDRNKRRRTGTGTGSPSAAAAGGGVITSGASGASDRGAEKQGMDPSETTDATAVDTFKRKYSTFHMHLSGKSGGVNIADNGRSVMAANENRIWVKYNEGFSNAVRKELVWKDL

SEQ ID NO: 337 - protein, 721 aa, Pichia membranifaciens
  source 1..721: note = SBI00817_PAN2-PAN3 deadenylation complex subunit PAN3
MSSSQYDWARNIPCRNIQIHGFCKFEHKGCSYSHDFKDADSSNLESHDQVKLDTGAGATALAKSDSVSHWSTLNFQAEESTDAASAPATTDSIASNAADLRISSNIANSSIGSVDVTRSLKAPAFKPTAMSVGLSSPVTDSQKFKVDSPAFTPVSINKFSALSPSLDNIPAFIPSASNGERATSSIQSKLMAADVDVKGLGAPLDAQSNAASAEPSGVADVRSIKSALPNISPFNPVAPMFTPQTGITTRSPEFVNSIQTPTGEDLFYQNTNLYPVNFLLYAPAPPPHINLNKKENERTVDDLFIDGKLREYLQLKNEESLKSVSSNEMDLPSHVGPYHSLYPIDKTFDYSSKSFGYTSIVYKCLSNVDGRLYTMRRLQNVPVTSPSVLKSVKKWKMLDCANCVKIYDAFTTRAFNDNSLILMYDYYPMSSTLLENHFMSFLGKNPELITEDSLWSYTIQLLNAITEVQKLGLKIGPMDSSKIIITNKGRIRLSALAIKDILHDVNSENKPDQNAAHEKKDDASDVSDLLHLGKLILFLAKSTTFLPVPTEDPSEIIMQLKFTKVFKKMLLYLFSEHATVERFQELVAPMILKLSNGLQNSCDTMEGALTTELENARLVRLFAKLDFISERPEMIKDGSWSETGERYPIKLFKDYVFHQVDENGKPVVDLTHVVNCLNKLDAGVDENLLLVSPDEMTCLVMSYKDLKDLINRSFMKLIGKD

SEQ ID NO: 338 - protein, 976 aa, Pichia membranifaciens
  source 1..976: note = SBI00817_Ribosomal protein S5 domain 2-type fold
DLLFDEFGNPLNGVSEDFSSDDESDISMHDIDSKKEDEVSDAVVVADEGPVFSTLSETFGDDVETIIATSDAKRLDEPIVEPQVEKNFMLEEEELPPTSYSKKYMWELSKIQEKVRNVALCGNIHSGKTSILDMLIQQTHYFDEAETTKPHYSTKTEAELKYTDNHVLESKKGISLKSSAMSLLLPDLNEMSALINFLDAPGHSNFADEMVISIKLADTVVLCVDIVESATRSTEQAILYCLKTNTKMVLMLTKLDRLVLELRLPPLDAYYKIRRTIEQVNEMVARCCHELKIDYNYAELIMSPELHNVCFSSNVLNTIFSLRSFTKRYIEFNNLEKNPKVTLESLSTKFWGDIYFEDRKFFTKPKNVLASANARTFIKFILTPIYKMITNSLALDADARQELFEKKMRLRLKKSEYRLDSKPFLKKLFPAFFGQPSLALVSMLKESPSPKSNASSKLDFLYRGPKESLVSQAITDCDSDGPLVAYVTKLVDTRDSEHFYALVRVLSGVIKSGSKVHLLGEEYSPENTDDYKLQKVSKCYMWCGRYKIEIPELRAGSIGLISGPGMDNFIVKSATIYDRNLDEPYFALRGTEQLSPPVFKVALQAYNPKDLTKFIDALKKLNRAYIGCEVKVEDNGEHSIFGYGELYMDCLLHDLRVLYSGIDIKVSDPTVKFSETIDEVSRVKLVIKSNNGKNSVSITAEALDPVLSTDIKNGVISITRDPPRKFAKKLRDVYGWDSFAARSVWSFGPEEDGTCLLCDDTLPEEVDKELLKQHRNAILKGFQWAVKEGPLCEESMHDIKFNIIDIKLSEDEADRNDAQIIQMIRKACHAAVLIAFPKLLEPVYEIESICQFDVLGVLEKLIDRRRGSILGKERVEGTPLWKVKGMLPVIESVGLETDLRLSTQGMAYPQMLFSRWEKVPGDPMNVDAFIPLLKRAPVESIARDFTLKTRRRKGLSDEVTLEKYVDPETWLMLTEL

SEQ ID NO: 339 - protein, 234 aa, Pichia membranifaciens
  source 1..234: note = SBI00817_Ribosome assembly factor mrt4
MPRSKRSKLVTLAQTDSKGRENKERIFDEIREALDAHKYTYVLGLDDVRTPVLQDIRKDWVGSKLILGKKKVLQKALGQTPEEEYKNNLHKLAKYDNGLIGLLITDETPETVNEYFDSYVKNDYARAKSRSPITFTLPEGVVYSRGGQIPIEEDVPMSHSMEPTLRNKFKLPTKMVHGKITLTEPVQVVEEGQVLDVTQALILKTFGVACAAFKVKVYAYHDGESEETVAVAKE

SEQ ID NO: 340 - protein, 938 aa, Pichia membranifaciens
  source 1..938: note = SBI00817_WD40-repeat-containing domain
YDVAFAAGGQPKAHLNRLSLDGQNSIVFFNNHISIYSLQSRLPIRSFNNINVPSLPFDAIVDTFVSPVNSKLVYLLTKSSVYILNWYDNIKEPLISEINLQSKIQKDGDEAESHIEYVQIINFQVKTETKINILAKEGKNTYHILSYDLDENKVSSNLATYEDIALYSISNNFKNIAFLVKRSMSTSTVQFHVFSFGDDNNSELARYSFTHALTYSKSNVVKIAISNDQADPMLAFALTTGLIILMFDLTSEKPPLKNLKWHMDPVRALSFNHDSTYVMSGGSEKVLVFWNIMNEKQQFLPRLNGPIENIQLNSNIPTLINLSLSVIDNDTQYLVLNTTDLLTKLDINTPHVLAGLNDETTNSLKKNVNRDINAYLKTKSKASPQYSKFKHNYNLQFRINPKSSHLYLPAGRHLQMYDHLHDNQVGNLAVVQAIQQYGKVGAEHKIHDPIVVGFDFVQCAKTKERDWLVTCDVEVRGEAEDLSNASIERWETLKFWKYNSVGPISESDNVSISDSWSLQTKILTPHGDSPITAIVPAPASYFGGEAVLTADAAGNVRLWRPNSQGIWSLRKFYLGGAEHNDNESPASATTSKKQFNLNNIANNEGTSCAWCPDSSMIAVGRNGKVMLLDVNTFEPIHTVKPAISASRFHTHASITDENDGSDSTTQNTSAQEQNGNGHCPPRPFSDANYGKQTRYLDLNVQNSHIQSVNFTSNGKLLVVETRTHLTVLDVLKNKVVFGMVFSNENLTSGFGGSFIRLVSRSKDELETNDQSGDDLHDYTTDELMVVSKYFDKNTSKINSKITLWNISDKKSTVVCKWCYHYDGSIIGAEWSETWQKWIMADMDSNLGEIGHGKSYSRSKLLKDVASKEHESNWIVSSLLDNARIINRAISTSAAKKAVSGSDEFNDRVGLQNSTFDGVLDHLDGVSPETLFERVLRVV

SEQ ID NO: 341 - protein, 598 aa, Pichia membranifaciens
  source 1..598: note = SBI00817_Zinc finger C2H2-type
MKTDYYVLLNIDETATSIEIKKAYRKKALLLHPDKNPDDIENTTRLFNEVRVAYETLSDPQERSWYDSHKFQILMEDGDSSAGSTSGDYNDDNANTYYAGTQVEDIQKYFNVNLYQRMDDSISGFYSVVSVLLDKIASEEVSSGKQQKLPGFNKFKDDTSFATVCDPKELMYPRIGNSKTDFESTKIFYKAWSNFQSVKTFGWCDEYRYSTAPDRRTRRLMEKENKKLRDVARKSYNDSVRNFIAFIKKMDPRMDAKMKKEYEKQKLAQQREEMRRQAQIEKEERQRQRQLFEEQEWQTVDPDELAEIEAQLDKIHQEEERLNGNAIDDDDELEDDIFECVICDKLFKSEKQFQDHERSKRHLKTLKQLQWEMRKEGIELGIDDDYIKEEIDGDDDDCDVFDDALETLSDLDELTNEELELMFEQQMMEDNVKHAKKREESGKVELDENPRQTASNEESEEDSTIRSNGFEYQIDNQIDDDIYGDEETFKSKTKTDDKLEELSRILNGVGLDSDDDDDWGSTKKNSKEKKGKKNKQRNIDNASSMPSTGKLQETFAEKCSVCEETFTSRNRLFQHVNSTGHAAPPSKVKKTKKKKAKK

SEQ ID NO: 342 - protein, 355 aa, Pichia membranifaciens
  source 1..355: note = SBI00817_Zinc finger, RING/FYVE/PHD-type
QQRLTFAAYFILSAIATITKYQSLYDTSANYYVLGVRFSQGDAVLILANMTVATTLLVGTLLQHFVFGELRLIEIEHLYERSWSTIIGILMSSSAYKRNENTMFLVVLFCGLICSKVFHCIMCDRLDALIQQFYQRSDGNIRSIIMNRVIFMLLLFIKIDISLIKSCIDESFVHRSAMLLLISFEMFILVTELIYAGLKFTLDVYEIYYTQKHPEEEIWSTKVWIESIVKAVLDLLKSVMIPTFFVFFLFLETLPFSLLAESFRSFYAFGKSATKIYRLAKNARKLNDALREPTTEEIEDTDICIICRDDLVLGGTGTSRSVPKKLPCGHILHDGCIRSWLQMSNACPTCRKEVI

SEQ ID NO: 343 - protein, 394 aa, Bacillus safensis
  source 1..394: note = SBI00997_ Phosphoglycerate kinase
MNKKSVKDIDVKGKVVFCRVDFNVPMKDGEVTDDTRIRAALPTIEYLTGQGAKVLLASHLGRPKGQVTEELRLTPVAKRLQELLGKEVKKADEAYGDNVKKQISDLKEGDVLVLENVRFYPGEEKNDPELSKAFADLADVYVNDAFGAAHRAHASTAGIAAYLPAVSGFLMQKELEVLGKAISNPDRPFTAIIGGAKVKDKIGVIESLLDKVDNLIIGGGLAYTFVKALGHEVGKSLLEEDKVDLAKSFMDRAKEKGVNFLIPTDVLVADDFSNDANTSIVPISEIPSDLEALDIGTETREKYADVIKNSKLVVWNGPMGVFEIDAFAKGTKAIAEALAEAKDTYSVIGGGDSAAAVEKFGLADQMSHISTGGGASLEFMEGKELPGVTALNDK

SEQ ID NO: 344 - protein, 132 aa, Bacillus safensis; identical to SEQ ID NO: 250
  source 1..132: note = SBI00997_30S ribosomal protein S8

SEQ ID NO: 345 - protein, 166 aa, Bacillus safensis; identical to SEQ ID NO: 251
  source 1..166: note = SBI00997_50S ribosomal protein L10

SEQ ID NO: 346 - protein, 95 aa, Bacillus safensis; identical to SEQ ID NO: 252
  source 1..95: note = SBI00997_50S ribosomal protein L23

SEQ ID NO: 347 - protein, 557 aa, Bacillus safensis
  source 1..557: note = SBI00997_Arginine--tRNA ligase
MNIAEQVKDALKEEIIAAVVKAGLADESQVPDVLLEVPKDKTHGDYSTNMAMQLARIAKKAPRQIAEDIVNAFDKGKASIEKLDIAGPGFINFYMNNQYLTKLIPAVLEAKEAYGETNTGGGQKVQVEFVSANPTGDLHLGHARGAAVGDSLCNILDKAGFDVSREYYINDAGNQINNLALSVEVRYFEALGLEKEMPEDGYRGEDIKGIGQKLADEFGDRFVHEPEEERMKFFREYGLKYELEKLRVDLENFRVPFDVWYSETSLYENGKIEPALETLRAKGYVFEEDGATWLRSTDFGDDKDRVLIKKDGSFTYLLPDIAYHKDKLDRGFDQLINIWGADHHGYIPRMKAAIQALGYPAGKLEVEIIQLVHLYKNGEKMKMSKRTGKAVTMRDLIEEVGLDATRYFFAMRSAATHMDFDLDLAISTSNENPVYYAQYAHARICSMLRQGEEKGYEPNLEKADFSHIQSEKEYDLLKIIGSFPEVVAEAAEKRIPHRVTNYIYDLASALHSFYNAEKVIDAENETKTTARLSLMKATQITLANALKLIGVSAPEKM

SEQ ID NO: 348 - protein, 185 aa, Bacillus safensis; identical to SEQ ID NO: 254
  source 1..185: note = SBI00997_Protein GrpE

SEQ ID NO: 349 - protein, 371 aa, Bacillus safensis; identical to SEQ ID NO: 255
  source 1..371: note = SBI00997_protein NusA

SEQ ID NO: 350 - protein, 373 aa, Bacillus amyloliquefaciens
  source 1..373: note = SBI01150_protein NusA
MSSELLDALTILEKEKGISKDIIIEAIEAALISAYKRNFNQAQNVRVDLNRETGTIRVFARKDVVDEVYDSRLEISLDDAQHIHPNYLVGDVVEIEVTPKDFGRIAAQTAKQVVTQRVREAERGVIYSEFIDREEDIMTGIVQRLDSKFIYVSLGKIEALLPVNEQMPNESYKPHDRIKVFITKVEKTTKGPQIYVSRTHPGLLKRLFEIEVPEIYDGTVELKSVAREAGDRSKISVRTDDPDVDPVGSCVGPKGQRVQAIVNELKGEKIDIVNWSDDPVEFVANALSPSKVLDVIVSEEEKATTVIVPDYQLSLAIGKRGQNARLAAKLTGWKIDIKSETDARDLGIYPREHEEDDDLEPLFMEPETAESDE

SEQ ID NO: 351 - protein, 239 aa, Pichia membranifaciens
  source 1..239: note = SBI01187_Exoribonuclease, phosphorolytic domain 1
MELYSPEGLRIDGRRWNELRRFECRINTHPNSSDGSSFVEQGNTKVMCMVQGPMEPVLRSQLNPNQANIEINITIANFSTTERKKRLKNEKRLVELKATLERTFEQSVMCKMYPRTVIEVNIHVLAQDGGLLAGITNAITLGLIDAGIAMYDYVSSISAGLYDTTPLLDLNTLEENDMSTLTIGVIGKSEKLALLLLEDKMPLDRLESVLAIGIAGGHRIRDLMDEEVRRYGNQRLSKV

SEQ ID NO: 352 - protein, 683 aa, Pichia membranifaciens
  source 1..683: note = SBI01187_Heat shock protein 70 family
MWKNNRFLLSGATFLYVLLAVILPLLATHGNGVGMANAEENDTDSYGTVIGIDLGTTYSCVGVMKNGKVEILANDQGNRITPSYVAFTEDNERLIGDAAKNQAPSNVENTVFDIKRLIGLKYSDDTVQKELKHLPYNIAKKDGKPVVKVEFNGEEKTFSPEEISGMILSKMKNIAEDYLGKKVTHAVVTVPAYFNDAQRQATKDAGTIAGLNVLRIVNEPTAAAIAYGLDKTDGEKQIIVYDLGGGTFDVSLLSIEGGVFEVLATAGDTHLGGEDFDFKVVNYLSKLFKKKHNIDISANAKAISKLKREAEKAKRTLSSQMSTRVEIDSFVDGVDFSETLSRAKFEELNIAAFKRTLKPVEQVLKDAGAKKSEIDDIVLVGGSTRIPKVQELLEKFFDGKKASKGINPDEAVAYGAAVQAGVLSGEEGVDDIVLLDVNPLTLGIETTGGVMTTLINRNTAIPTKKSQIFSTAADNQPTVLIQVFEGERALAKDNNKLGKFELTGIPPAPRGVPQIEVTFSLDANGILKVEAMDKGTGKSESITITNDKGRLSKEDIDRMVEEAEKYAEQDAELKAKIESRNSLENYAHLLKGQINDDSETGLGSKLDEEDKEALDDAVKETLEFLEDNFDTATSEEFEEQKQKLINVANPITSKLYGGAGGAGGADAKFGDDDSDDEFDHDEL

SEQ ID NO: 353 - protein, 501 aa, Pichia membranifaciens
  source 1..501: note = SBI01187_NADPH-sulfite reductase
TTRLQRIPTYSVAVVGTGPAGFYTAHHLLNKASPSDQFKLNVDFFEKNPVPYGLSRYGVAPDHPEVKNCEEYLDNLMTKYREVAANNGEVLHTPNHRVRFFGNVEIGKDITLEELERKYNSIILSYGCTNSDNKLSIPGADLKGIMSAREFVSWYNGSVDFHESGAQPPSLDKVSTVTIIGNGNVALDVARVLLADPETHWKSTDISLRALEVLNNSTVKKVNIVARRGVLESAFSNKEIREILELSDGTNLSFVPIAQELTDEIRPNVKSLNRIDKRRFQLLDKYSKLQPEDRTKASKSWELLYLKSPVQFLGDSDGAVCKTEFVRNKLEKDSLTGTVRVAKTNLFETIENELVILSIGYQGIPLEEFKKLDISFDKNRILNQEGRILSSTASGGENLHKLVYRPGWYTSGWIKNGPKGVIATTMMEAFETADCVLEDLSNGITTGGEIKDTKEGINPAFEGFSTVTWDDWKKIEQHERDLGKKFGRERVKIENRAEFLD

SEQ ID NO: 354 - protein, 750 aa, Pichia membranifaciens
  source 1..750: note = SBI01187_p-loop containing nucleoside triphosphate hydrolase protein
SKNVRLFDGSTISLKPKKRSEKVNVDNVALSTGESLDLIDIDVLYAKVELKRAIKSSNTIISTTIESKTKGKNGSKVAGLWTDKYKPKTFMEVCSAGNDKLYRLILHWLRKWSSLVFKEELPQNDTTDHLGRPLKKILLVNGPVGMGKTTVAHLLASQLGYSVQELNAANSMDPSLGSTHGGSALKNKVINALTSNSLTSNGKPTCLVIDEIDSAINSAEIIKVLTDLIHLDSRNRTSATATEKGKKKPFQLNRPIICIANDIYQSASSGTSSSFLSHYSIDKLRPHCEVITFRKPVATQSGGGGGNGLRTVKDFLMQINKWEKMGLNFREINEIVEICEGDIRSCINYLQFNSAGKVYDDLLEDQKSQQSQSDSISNSLKDTQLSWFAIVALLFKRKQNLSKDENFANLLNLFTNGGGKALTSSNSVVEKVIKGSFNKYLDAVAIQDDSAVKPSHLSDWLWFYEQMSHHGSGSSSTLLENYSPALYLKIWSMFSDINLSRLPGANNALVPQGIDFESLELSKHNKFTMKRIVDNFPIQLRISIGNGIESSNTIPGNFLPYLDKMMTPIHSTNTNPNQTTNHEKIAQIIKDFLFQLENHKDLDSGEIKLQISPEFDSITNFNTELSPQPLTIVSKMVQLKRKWLFPLIKLELDKVDSLRKRKHVTLASRNKSEEPEGKGETKQKRSRLTNSADFFKARYDELATQTSGSLESEKTNKDNDKNTGTSHIWVKYHEGFSNAVRINIGWEDLW

SEQ ID NO: 355 - protein, 718 aa, Pichia membranifaciens
  source 1..718: note = SBI01187_PAN2-PAN3 deadenylation complex subunit PAN3
MNINIDSARDTLCKNILIYGYCKYENKGCVFNHNKGATIGAGQATASTAPGLPSSTTTPAVSATTGTTTTQASGTSTPGVDTRKRFNFNTPSFQPSSIPLASNSPTPANAVNSASTNSSKFISSPKLKEIPAFVPEGLNATDGVAKKFNPSTASFTPSFVPAPQLDQHLISNHPIIQDGSGKGNGIMHLANGGPGLVGSGASTQVTGILQHPQAGNQPPGQIQGQGQLTGIIQHGPGGPGGALAAQGLQGAPGNYLNPYSGPPSSSDLFFQHQTQTRTYPLQYHLYAPAPPPRLTIPLPPSETNAQNLFILNDLRESLTKKNETTLQLFPTTSHLPDHVNSYHSLYPLDLSTNGLKSKLFGVPLTHFKVFSNNDGNPYTLTEVESYSLVRIQNELPFRTIKKWKCITSANVVKLHESFTSMAFGGKNSVLVMIYDYYPNALTLLEHHINRRIGGKLEPLSEDILTAYIIQITSALIQIHEKGLAARSSLDINKIIVTSKNRIKLSCVGISDILSYDGDQKQIDTTGLAAFTNLLQTEDLKKFGKLILDLSLLCIPPQLRDQGINGLKGVFTQEYITIVGAISSATSIAEFNQTYLSHKLIDFVNSAQDGQDFMELQLSSELENARLFRLLTKIDFIVEKGLNSGQNGPNYIIKLFKDYIFNEVNEFGKQTLNLSRVLTCLNKLDAGIEEKILLVSEDEKSCIIVSYKEVKELIGGSFR

SEQ ID NO: 356 - protein, 977 aa, Pichia membranifaciens
  source 1..977: note = SBI01187_Ribosomal protein S5 domain 2-type fold
DESIYDEFGNLIGDPSDSDAESSDDESVHQSPPSHESHSASSSDDDEDDAEIEGEPVQQGSLVKHSLSGTFGPNVETIISRPTDEMIDEPVIQPVVNKSMRLEQDATSVGETDQDLEFEPSTIYSRKYMVDLANSLPERVRNIALVGGLHSGKSTFVDMLVVHTHANSIASPNRSKSFEPLRYMDNHKLEVDRGITIKTNAITLLLSNSDERSFVCNVLDTPGHPNFIDEAQSAMQAADGIVYVVDIVEGMKNSTDKQLLSQAIRQNLPITIVLNKIDRLILELGLPVHDSYYKIRNILEEINTYIEGCEYIGSYKHETDMSPLNGNVVFASAKYNFTFHLQSFANLYRESFGNSIDLYEFSRKLWGDVFYDVSNNQFTTSSNGGRHKRTFNSFILEPLYKIFIQSVTSDSAGDKLSQTLWENFNVKLHRSKYSQDVQILLRDVLSEVFKKSGGAAGALSSFVDMVSSEISNPTEVSHQKSTLVGHVVKLIESHDGSKFFSLVRIVSGSLKVGDQVRILGENFEEDEEDQKLETVTELYLPGGRYKVPVKSVGLGSIVLVGGIDRIVSKGATIVLQAQPLNLVEHTYIPPSYSATSVFKVAIEPAKPSQLPLLLEGFLKLNKSYLSCQVKVEESGEHVVLAPGELYMDCMLHDLRFFFTDNLEIKVSDPMTKFSETCINPSTTKINTKSANGQNQISIIAEPVNDKKLSKAIELGEDFTPKRLRNEFGWDSLAARSIWCFNTPPDGKGPNILLDDTLADETDKELLSLVKENINLGFKWSSNEGPLCDEPIRGTKFKILDAVLSDVTIQRNGTQIIPMARKACYTGMMTASPRLLEPIYSVHATCSSYGAAKAVSRLLSKRRGYVLDDLYKPIPATKLFQVEGVVPVIESIGLETDVRIQTQGQAMIFLEFSKWDMVPGDPLDQNCFLPTLKPVPTESLARDFVIKTRKRKGLSGEPNLQKYVNTEIYEKLKESGLV

SEQ ID NO: 357 - protein, 228 aa, Pichia membranifaciens
  source 1..228: note = SBI01187_Ribosome assembly factor mrt4
MPRSKRSKLITLAQTDKKGRENKTRIFDEVREALDEFQFVWVLQLDDVRTPVLQDIRSDWIGSKLILGKRRVLEKALGDNANEEYKDNLHKLTKLCTGVSGLLFTNEDVDTVSSYFTSYTKADYSRAKSKAPIDFTIPEGVVYSRGGQIPLEEDVPMSHSLEETMRNKFKVPTKIKAGKITIAEPYVVCRKGDNLDVRQALILKQFGIAASEFKVKMIAYYSNESSEV

SEQ ID NO: 358 - protein, 899 aa, Pichia membranifaciens
  source 1..899: note = SBI01187_WD40-repeat-containing domain
SEEWSKKMASGGKPLWINSPSGSTTRFSTDGRYAVVLMTHEIRVYFIGTRQCIRTISISLQGVIDTYMDPLEPNKILLFKNDGHIVTVNWKDKISQPIVSTQQVSHSNSGSESLLGVVTIQKSFIYMITGKNNNNTNNSSAFTPAQSRRIIKVSRDTLESTEVLEVANVIKYATSLDRKKVCFVTSNHECLLVDMTSVVYNEADQQQQQEEEVAKISKEVIPFAYRSPITSLAVSNDSVIAIGTMAGAIQILYGGINENKTQRLLKWHIDQVRSLQFNADGTYLLSGGLEKVLVFWQLDTDKTQFLPRLNGTIEKISIDVNKPDFYSLMLKIPVSAGSGSNDGESSTSTNTGKNGHNSSSSSNSNSNTNEEDDQEASFEVLVLSAVDLVSRLSVHGIRPKFAHSNVKSTLAKTKKRFAKLNSEYDISKLKHDYSSIFEVHPLSQQLYFPRGATIQAYDLIRNEQSFTQNAAPLLSTGKVRSEAKLIDPEISSLSFSYNGQWMCTFDTISTSEVDNLISKNDLQYALKFWKYMENTTSTSGSPSAGSASASGHWELSTKIIDPHGPGNSILSITAAPLKYHNGLAFLTADAKGGLRVWRPRIPKEIYQNMKQANNNNKLQQTAWTLRKSKPSGALVSNAVSTCWSEDGSIIILGHECSISAFNTHTLEEISKFQIPAMSGSRIRSLSILGNYLIVLSKTRITSFDLLSGSFTPLCAKVNTTLGAKNLIAIDKVNELVCLAVNFYKEDDESSQLGLQSKILVFRPNELEPVFTVQHNQGISSIRQFRSLFIFVDLDSRVGVVSSALLSAKEETDGEASDLSNDMNKMLLEAQAAADIVNNRAITSSTASKSASTSNGHIEEEEEEVQFNRTIDINTFQPIFENLEGVQIDSLFDKIVKIIK

SEQ ID NO: 359 - protein, 570 aa, Pichia membranifaciens
  source 1..570: note = SBI01187_Zinc finger C2H2-type
MKTDYYELLQVETTATDAELKKAYRRKALQLHPDKNRDDIEGATARFALVRAAYEVLSDAQERAWYDSHKLQILREDEIGQTSGGTYDENFYDPAVAGTMVEEIMRYFNPTLYVKIDDSLAGIYSVAGRLFDRLASEEVSHGKTQSLDGFNKWFDDTPQANAVDPSSLLYPRFGNSKSEYANDVRNFYSAWSSFQTVKEFHWKDEYRYSQAPDRKTRRLMEKENKKLREAARREYNEAIRSFVTFIKKRDPRIKEGLKQFELQKKKKQQKELEEQVEAARVARLQQLAQNQSAGAVQDWQKLSENELKELEDMLKEEYELKTDSEFSDDDKFDDEGSDIEENHYECVVCNKFFKSEKQFEAHELSNKHKKTLRKLKWEMKQEGIDLGIDKDDIDLDEYATANENEDNESEEADDPELLEVDEPEAGNDTLSNAEEKDVDFLTFAVDDDLNSDFSLSDSSFTIPLPTSKKQKKKNKRAAKPVPIDDTDEIVDDELTKLAAGLTIDHSDDDWDTKKPKKVKKKKASTPKIPNGSEVCVVCDEIFTSRNKLFQHVKVTGHAAAPNKVKKKGKK

SEQ ID NO: 360 - protein, 403 aa, Pichia membranifaciens
  source 1..403: note = SBI01187_Zinc finger, RING/FYVE/PHD-type
MKQSSTYFLCYTAASIALFSWALYDSLEKSTEFFTLMVDMTDGYKLGILLNLLLLAFIGIGSISLYLIFGTLRIIEIEHIVEKVPIFVINLLFNLTSDDNLIFNCVLLGISVVFKVFHVVLTDRFDFVLMKISNLANNDSSISTKRVMLEYCKSLHFWLLPIGVVADFSIAKILVYDVFKGINSVTCLLFGFQFAVQGVELLTYYFKVLLNLYELVFYRSSESDDEAEEDEETEDNPEGLFVDDDEDLVWESKAYYIKTVEIVSSSLKAVSYISFIYLLTVTSNLSLPISMLQGTYSSVMQTYKDIVQLLVFIESSKKLDTLLPNATREELDNSDNLCIICREDMHSVEEYHEHNQSEAGRKRPISSRKYPKKLACSHIIHMGCLKDWLERSENCPLCRRKVF

SEQ ID NO: 361 - protein, 2466 aa, Talaromyces atroroseus
  source 1..2466: note = SBI01292_Exoribonuclease, phosphorolytic domain 1
VVAELTPILQSIQEISDTQPFDIDHVLRATENTLTLRHSLIDTAQPREAKDVFRNLGGFQKLLGLIRRLAELYNPKLLSKDDRKILLSLLKDLLAVLSECLRDHSGNRRYFAKKIVCEECWSIEESLKLFVGKLNGEEIPESDVEQIYGALLAAALGQETVTEIFTALRTKYASDQNVPTLSSVRLGVDKLLNSTETVELHEFIGPFLRTWLLQSAGSTQYPIQRLAIPACLCKLASNSRRNIIALHTTGISSSVLRSVFDAGFSAQEKALYQELGDLLCTEGISNLDDVVYLYRRSCGSTEASKFLLRAMQSSKEPPCIQFDMFSHGYSSIELSTLGRQFPPLSSSGYTFSIWARFDEFDPKSHTTIFGAFDARQTCFVLAYLEKDTRHFILQTSINGSRPSVRFKSIAFKQGQWYHICVIHRRARTTTPSRASLFVDGEFIEQLRIDYPSAPVARPPNKYPRVQAFLGTPQDLAVRIGKGVCATKWSVANAILSEETFSDDLVSVFYHLGPRYHGNYQDCLGSFQTYKASAALNLRNESLHPGKEENSDIVTAIRQRASILVHESSFLMNISPTTVLDDDDSNYVNESQLIKSLSRQAVKNLHGMIHAGGNAIAINGAIPSINDALTYSHGMAILAGDPVVSVPQSLDDASWRIGGCVAVHLNMLHAATCPENTVLAVEILFEAIQGNWRNSEAMERDNGYGILALLLREKLGFPQTTQPGGAKTSTVCSDNRERSSLAIELLRHILSFIGYNFEEPTRSIITNPLAYRVLLVDLDIWRYGEPSLLQMYYSQFSTFATESQHRRFNARRLSRMRVNKRFLDALKGEEFTEETLSLFIPAFRSLFESCVSAELLRSLSLFITYALHEDKIPKLQTKKSMRFNSRSRQASSASDPKLKKGMPKRQIGLELLRMYTDFLCAPEDFTNIKRFARAVTNKVKWLLYLMCEDAPDAVIMATKILARLIIVHGGSYSKKLADKTGGYIIMKNRLKRWWNVFALWPICFAILFGLDVTEVDTESLTDLSSLMDILAYKRRLDVVFPEVLPVIADMLRMGLEDSIFNNASAKDRAVVSNVVAFLSDIHSKSPGFRDFAATSTYTQKLLFVLFPMTGSRTVNAEVELHYREDRPSSAHKDAKIQHTITPTPILRTSRVAPSDSTSDTHGSLRRSSSFVLISSDGPQYAPSAAQLFRASIARIDKDTTYENNELVLEIRAIILKVFVSQIIERKDFTGLGLFLKTPPSNLEHQAYFVSWLLRGTLAKLQTTLSANEKLLQEPRVLTSFARFLTHVGESLFEGWLLNGSNETLDLAGFVLEYLSRPEIASLKIIRLCNQAITTIRSVLFKVILFELSEQDDSGSLAFLNRLEYWQTIILAAGESETDYLKLFFYQLYIKSVSEKIEIRLAAATLWRIILVQKPSEMASILSHAPLSLQRRLTNGFEELVGMDDAAFLSWIDDQREDLDSFFFGSLSKFWDTFVQEENNRTQESSRSRLSKRKDRLKQWVQEDNSAEEILRKHGTTFDHWTSNIFASEFLKHQRLLQDQQDNYTFMWSSFSRLSEDLYRFGGVLEKGGKNRWRLDQTEGRSRMRLRVIPDDSDERQDYQPKRKASEPPVMKINTQLQPTSSSEALSNTPTATVFAEESAEVGAAGADSEDKSALEDSFEMIDDPRIDIDEYEDKNRKVMRSLQRGDQVQSVCNMSRIIGLEACEGLLIIGKNAVYILDNYFQRADGEIVNVWQAPLEERDPFVRMIAGRESNEQKSREHEVRNWKWSDLISVSKRRFLFRDVALEMFFTDGRSYLLTLVSSRARDELHNQLCAHAPQFGGNMNVTRPEDIWRFEMLRVQDDAPQSLGSKFASVFGQPSLNPATRKWIKGEMSNFHYLMLINTLAGRTFNDLTQYPVFPWVLADYTSEDLDLNNIKSFRDLSKPMGCQIPEREAEFRERYKSFAEMGDENAPAFHYGTHYSSAMIVSSYLIRLQPFVKSYLLLQGGTFDHADRLFYSVGKAWESASRGNLSDVRELIPEFFYLPEFFVNSNKYDFGLRQNMTKAIDSVELPPWAKGDPKIFIAKHREALESPYVTEHLHEWIDLVFGFKQKGEGAIEAANVFHHLSYQGARDLDNIEDPVERLATIGIIHNFGQTPHQVFQRAHPRHDDPSRKEGYLDTLAESLTRVPLSLLGEKERVSSMSMKNERLLCTPAFRLNVPPNFDKYLEWGFSDGSVRFYAADSKKVLGHFEHLHVGQLSCVLFADSQTLITAGSDCTISIWSFGSNGKMMELQPLASLYGHRTPISVLVPSRSFSTLLSASTDGQIMLWDLNRRCFVRELPAEGPVECARINDRTGTIMICRGGRITLYSLNGSLLIDQVICETDDDCIISCAFYEGESNEWLERELIFTGHKRGVVNVWSKVIRNGRFDLDLIRQLHHVDQNKDTGVNVSAGISCILPLPHSVYTGDETGRVVSFASLEVYIWPCTNR

SEQ ID NO: 362 - protein, 653 aa, Talaromyces atroroseus
  source 1..653: note = SBI01292_Heat shock protein 70 family
MASSAKPGLDDSRRSMGSPKLRGRENAKDTLCRNVTIYGKCRYEDKGCAFNHDPHKFQNQNQNDNRKGLNVDSPSFTPSLLAANGSTPKKAASISPKAASAAPFLPKGVSMLSACSISMLTGRSDTASSEWSVAEIQDFVPQGFDLQGNGNGLISPPPYDPFVTPQSSIAAGSVTPHAVQASPFSHEAAAAVAASMGGAAFFSGQTGFQQPVQYHLYAPIGPHSQHIMGYQRNVHDLFLPNDLREELQKRSAATLQTLPDSSLPAHVDHFHSLVPLDLTHQKNAAMFGFPSWVYKAQSNKDGNFYVLRRLEGYRLTNEKAIRSVQAWKRITNGSVVTVHDAFTTRVFQDSSLIFVMDYHPLSKTLAEQHLGAGNRYAARTTGHIQEQVMWSYVTQIASALKAIHSSGLAARIIDASKILLTGKNRIRLNACAIMDVVQHDTQRSVQDLQLQDLVNFGQLMLNLGASGAGALGSPAKSMEHFTRAYSPQLKNSVFWLLNGLQKDQEHSIDIFIGGISSQLISTFDSALHMDDQLTSDLSRELENGRLVRLVTKLNFVNERPEYEHDRQWSENGERYFLKLFRDYVFHQVDAQNSPVVDLGHVLACLNKLDAGTEEKVTLISRDEQSCFVVSYKDLKKALESSFQALLKPARRIH

SEQ ID NO: 363 - protein, 986 aa, Talaromyces atroroseus
  source 1..986: note = SBI01292_NADPH-sulfite reductase
MSTDHRRRNMPLLAYSPFLTFVLFPFLLFLVCLPAPASAAGSAVLGIDLGTEYLKAALVKPGIPLEIVLTKDSKRKEYAAVAFKPSRDGSAAFPERFYGSDALAIAARFPDDVYSNLKTLLGLPFEEDGDAIKLYGGRYPSLQLEGAQGDRDSIALRSKRLGEAEGKDAFLVEEILSMQLKQIKANAEVLAGKGTTIRDAVITYPAYYTAEEKRSVELAAELAGLNVETLISDGLAVGLNYATSRTFPSVTNGEKPEYHVVYDMGAGSTTATVLRFQSREVKDVGRFNKTVQEVHVLGAGWDKTLGGDTLNDLIVDDMISKFVGHKKLKEGTTASDIRAHGKTMAKLWKESERVRQILSANTETGSTFEGLYEEDVVFKYKITRSEFESLAKDQAARVGQPIEDALAAADLKLSDIESVILHGGAIRTPFVQKQLEKQSGGSSKLRTSVNADEAAVFGAAFKGASLSPSFRVKDIRAVDSASYAIKMKWVSGEKEREQKLFVPTSQVGVDKQVTVKNLEDFEFSFYQQIPSGENLVDVPVLTVATQNLTASASKLTDSFACAPVNISTTFSVRLNPVDGLPEVTGGSVSCEVESKNPLGHVVDEVKRVFGLGKKDDQKPLKEDTDESTESVTPEDETTTSSETASSSTETSTTASSKETQKAEPTSGLKIIPITLKFSSSGRPLLSATELERIEDRLTAFDASDRERFLREEALNELEAFTYRGRDLTEDEDFLKALKEGQLAVLNERLELASEWLYGDGADASTKEYKEKLASLTEIVNPALKRKKENSERDAKVKLLQEMLNGAKSIQGLVETQIENDEASFSSLQAAESATSTTESSSTETSTTTTAAESASASGEVDLDEDPYSSSSSTTSSTKSSATAKPTAPTYTIYSPQDSAALQRVLDSVSTWFDAQLEIQQTLTESDDPALTVAEIDSRVQELERVLQRIYGKMGAKPASSSSSKKDSSKTKSKTAKTAKSSIKDEL

SEQ ID NO: 364 - protein, 246 aa, Talaromyces atroroseus
  source 1..246: note = SBI01292_p-loop containing nucleoside triphosphate hydrolase protein
MPVSKRARLVHESKTTKKNHKEQTRRLFANIREAVEQYDHLFVFSVDNMRNTYLKDVRTEFSDGRLFFGKTKVMAVALGNTPETAFAENLNKLTRYLTGAVGLLFTSRAPEDVLSYLESFRPSDFARAGNVSTRSFAIPNGVVYSRAGEIPTSEDAPISHTVEPALRKLGVPTKLVKGKVVLELVGGETEYAVCKEGETLDSRQTTLLKMFGITSSEFQIDVKAQWDRKTSEVKILEKTEGAMDVE

SEQ ID NO: 365 - protein, 394 aa, Talaromyces atroroseus
  source 1..394: note = SBI01292_PAN2-PAN3 deadenylation complex subunit PAN3
RVSSISASQALRASSSLSSTPAPPASLPTGLDRLDDTLRAAPATGPDYAASPSRPGQGTSPGGISRGSITEIYGPPGVGKTAVSIDTGSPIPTPRLKELLTSKLKLKSPDSIDSRLNECMTRFHHIRAPTLPHLLSLFAHPPPNFPAEGTSLLIVDSISAPFQSYFPNTTELRTRLQGQQQGPGQGTENQQKQAAQWLLNRKWNVISDLANKMVKMATATNSSSTANATNRPKMAIILLNQTHTKIKGQRRPTLYPAVGGGQSWENSVHTRIVLYRDWWSGNTSPSPSAFESSKVRYAEIMKRGGKIVSIRTDDNIFAFLIEGGLRELRSTMSTQQQPPSSMPQSTPILSVRKRKVDEVADSEDDDVEDDENVFADANEDDFQWDNPVDVEGKE

SEQ ID NO: 366 - protein, 1293 aa, Talaromyces atroroseus
  source 1..1293: note = SBI01292_Ribosomal protein S5 domain 2-type fold
MDPVSEPSTAPGEPVLPVAEVTTEPSNAPDRPADGQETLEPAMDTSEDNAQPPQPPAEPETAPTANVEEAQQPATETPENADAPVEDALAESNPAQTDDTPEPPAPESTEESAPAPPEEEPATWAGVEEDTSAPDEEELKKIEASDGDYSAMEDYWEKSFYSEVDDPEYRPSEKARLTWKVKGVRGTKENPNRAKVMRSPPAYVGGFWWTIKFFPRGNGSQSLSIYVECSKDMPTPDEKLPETNFTVRSGAPTDNLKESEPQMDIKIPALENSKEWFESYKKCYGYTGVNCDSVDSAAPGAKQVWRVSAQIGVILYNPNEPRTGWMQSSCHQFNPHNLDWGWTYFHGPWDEIHIRHQSQRQALLRNDTLAFDAYIRVFDDPTLSLWWHPSDSEPVWDSLAVTGHRPIGDSVINHSAEVAGLAAWVNLAPFRKIIQSVDVQEHRRNCNVKPRPLCEALQEFLWRLRHQDPETQCVDTDKVTSTLRNLHEYSSDVVEFWERMRRTLEIELEGTSAVEELARIFDSPPVAVSDPQGSNVTHTLSSQSQLITSVRIPVDKEKNIQGALNRYFKDQSGRWSLPPVLHVELNRQRFDYSARQWKLLYNRVDLDETLNLASYVANGQSGDFDLYGFIVHRGRRTSGKFFSILRPGGPGSKWVAFDDGSHNRVECLTRKAALESHVGLEDSKLKDANDKTGHDFAVAALYVRRDAIPEYLPGKLEAWDVAEPLRTYFETGSYASKEDASESEVKVEQTVQVEVYGLPAIEESLESIFDTYDLMSQAKRTGNVKYFTLPKSMSIADLRRKIAFSQTSETEQVSNNRVKLWKIGHSKRQLGAGLLFGRQDDLTKTLAKEGEVVRFWTHIMSEDAAKSFGLPEPAAVKIVEDKPEEIVEVRDAPDSDEERPTGEAGSSRVNNAAASASQPVESHQPEEPSNPEENATGAVTSGDDASTSLAENDEERMDVDVATSDAAAPDAEVPAQDVTQDTIMEDSPSESQDSSPESTSNSSTDASSVDTSEFVPHVYYFIQMFDTEKQVLKPAGAFISALSDNVKSEIRKNLGWEANKDFLLWSRIDNTSVVTVSPSENFSVSVGDGHCFIVGDRLNKEQRAKVGSTGLFTNPDRLVQYIWACSRKHPTRAFTGTKTIDATFNGDYYSGEFSKGYYHGKGTHISDTGTTYSGDFIFGQRHGQGKMEYPSGDSYEGDWVEDQRHGQGTFIESKTGNKYVGGYKDGKRHGKGISYWEVADEEMDLCQICYGEEQDALFYDCGHVCACVNCAREVDICPICRKNVLKVVKIYKM

SEQ ID NO: 367 - protein, 313 aa, Talaromyces atroroseus
  source 1..313: note = SBI01292_Ribosome assembly factor mrt4
MADRRRNNGPPSGTRAPVYASLLRSAGGEGAERPQRTRKATDLRKILKTGLIPSASGSSYLEIEPTSRASSPKSLIAPATSLKIACAVHGPRPLPRSANYSPNLLLTTHVKYAPFAHRRRKGHIRDASERDLGVHLETAIRGAIIAERWPKSALDVTITVLEAEDDRWWGDASGSSDASWGMMNVLAGCITAAAAAIADARIDCLDLVAGGVAALVVEGESGNKDNSQKNSPKLLLDPDPSEHRNIVAACVVAYLPGRDEVTEIWLKGDTSDVVASTAGKVSGHDALIDGAVDAARAARSVLAAAVMESGERF

SEQ ID NO: 368 - protein, 533 aa, Talaromyces atroroseus
  source 1..533: note = SBI01292_WD40-repeat-containing domain
ASHLCMQCARRGLHPSRVSVWNTLSRPSYSTTSYSNNRPFRVAIVGSGPAGFYSAYRLLSKSEDAMVDMYEQLPVPFGLVRYGVAPDHPEVKNCEEKFTEVAQSKRFNFIGSVGVGSQLPFEVMTPHYDAILFAYGASKDRELGIPGEDALKNVLSARAFVGWYNGLPEYRNLAPDLTAAEHAVVVGQGNVALDVARILLSDVDALRKTDISEHALEQLAQSKIKRVRIVGRRGPMQVRLFFKEIRELMQLPGVSFDGIPKEYLPPEEAISSLPRAQKRLIQLLAKGSTTDPNTASKSWSLDFLLSPHSLHWSPMHPYRLSHAKFTRNEFTSDGFAPNAKVKPHHLASGTLAQVNIPCNIFFRSIGYKSMPLPGFDALGIQFDERRGIIPNDGFGRVTSSSAAAEDSTTPLDNTHISHIPGLYCAGWVKRGPTGVIASTMMDAFGTADSIVADWEAHKTSGGEAKISFLNASSGGSSGRGWDAVKTEAVQRGLLNTDWRDWQRLDATEKERGKAKGKPREKISSVEEMLRIVD

SEQ ID NO: 369 - protein, 1393 aa, Talaromyces atroroseus
  source 1..1393: note = SBI01292_Zinc finger C2H2-type
DRELLAQLGEQQENPRPAARQNVFQTSVGSLSNQFTQEPTSPVLGQYSSSPDTTFQSSPLLRYFRSSQPQISSTPGFSETQNWPTAIDDRTRHQSSASPSSPRQISFSHAPPVVQGIKLIETQTLPDRFRALFPYPLFNAVQSKCFAHVYENDYNVVVSAPTGSGKTVIMELAICRLVNNLKDGLFKLVYQAPTRALCSERFRDWSTKFTTLGLQCAELTGDTDYAQSRLVQTASIIITTPEKWDSMTRRWRDHAKLMQLVRLFLIDEVHVLNETRGAALEAVVSRMKSVGSNVRFIALSATIPNSEDIATWLGKNDTLQHLPAHKEHFGEDFRPTKLQKFVYGYPCVGNDFAFDRLCGSKLPEIISKHSNRKPMMIFCCTRNSAISTAKDLSKLWSNTIPNKRLWSGPVKVPVVKNIDLKLVNSGVAFHHAGLDSEDRHTVEKAFLEGKLTIICCTSTLAVGVNLPCYLVIIKNTVCWQDGGCKEYTDLEMMQMLGRAGRPQFDDSAVAVILTKKERVPLYKKMISGTEQLESCLHLNLIDHLNAEISLGTISDIQSAIKWLAGTFLFVRLRRNPTRYKLKENADRRDEDEMLQQICEKDVKLLQETALVSEQGSIKSTPFGDAMARYYVKFETMKTILALPPRAKISEIVSAVAQAEEFHELRLKASERPFYRELNRGHGIRFPIKVEVAQHPHKISLLIQSELGAVDFPSAETFQKHKLQVQQDKAIVFNQINRLIRCIIDCQIHNEDGVAVRNSLELARSFAGRVWENSPLQMKQIEQIGVVAVRKLATAGITTIQTLEETEAHRIDMILSKNPPFGMKLLARLAEFPKLHVTIKMIGKVSKFSKSVRINFRADIGFLNEKKPTYFHKRPVYVCFMAEVSDGRLIDFRRMSAQKLHNDHEILLNAEITSPLQHITCYVMCDEIGRFAMYAELKPDVPESFFSGDYSEKSSIPSDNVSMNTSRRRNGDNPRQRKLSSRTENFEDDDLPDDAFLAASMTFDYHHSQQTTSDLAPKLSRGSEHGKYGIPHETKVEQPVMLDNGKYNCNHKCKDKSCKHFCCREGLDKPPKVHVKVAPLKPHQDDRAKSSQLTLSGNNLEKTTSNKDSHNDNEFEYDDAIDYLDLTQPTRPQLSKGYLKNQPQKRIAHDYKVVSSKATRMANLDDVSSQSMFLKSSLTVDKFFRKDESRKNSSRRKHSSSEYDDSSLDELFSPARPTAHGNSKSGSRPKTLGGVDLDNGIERYDQALRKSPVTGTKRHASSTSQHSLTDLSEPRSTPLNNVPKSASLDRGNVLPQALHEKATRLDLRPEAKSLKRKTEPLNDATNSSKNISKRSRMDPNSVSVGPDIDEVNYPRLHSSNELHAGPIEQSESQYEDIDQLLMQEFGDIVNFSGI

SEQ ID NO: 370 - protein, 433 aa, Talaromyces atroroseus
  source 1..433: note = SBI01292_Zinc finger, RING/FYVE/PHD-type
QETSVSRPVPQMGTLTQSRSHSHSISLGAINANHRVTRRKSMSRRGTESTSIGATSGFSSYLSRGIHAASPDSAAGRKPSPSSIDENVAVDGSSPAEKPFNTKNRNRRASEGAPLLRGEGKRVSTELRCDQCGKGYKHSSCLTKHMCVYPDLHNPAWAVTSKLLISKHQQVQLLEAATVLVAMNHETADAAAEVAAAAEAEDDEVDINEVESDNSSASPGASSDLHDGISSTETTPPPMDEEDIELDTKSYRNPNFNNFAFSQSYQSVASSSYADNGSLHSPAFSHFRHSSIDTRPSTAETFHEDDSEASDLVAAIRLCNFGTPRSNAVATSSDVPPVPPLPARYLSQHSGINTAGSVHDNYGGSFGIAGSTPAVFGSFSLDPSQSYKVSDERDVKMGDADRESRHRRNNDVDFGSRQTHDDDDDGVFGRMEE

SEQ ID NO: 371 - protein, 394 aa, Bacillus amyloliquefaciens
  source 1..394: note = SBI01595_ Phosphoglycerate kinase
MNKKTVKDIDVKGKVVFCRVDFNVPMKDGEVTDDTRIRAALPTIKHLADQGAKVLLASHLGRPKGEVVEELRLTPVAARLGELLGKEVKKADEAYGDAVKAQISDMKDGDVLVLENVRFYPGEEKNDPELAKAFAELADVYVNDAFGAAHRAHASTAGIAEHLPAVAGFLMEKELDVLGKAVTNPERPFTAIIGGAKVKDKIGVIESLLDKVDNLIIGGGLAYTFVKALGYEVGKSLLEEDKIELAKSFMDRAKEKGVKFYMPEDVLVADDFSNDANVQIVPISEIPSDLEAIDIGTKTRETYAEVIKNSKLVVWNGPMGVFEIDLFAQGTKAVAEALAEANDTYSVIGGGDSAAAVEKFGLADKMSHISTGGGASLEFMEGKELPGVAALNDK

SEQ ID NO: 372 - protein, 132 aa, Bacillus amyloliquefaciens
  source 1..132: note = SBI01595_30S ribosomal protein S8
MVMTDPIADMLTRIRNANMVRHEKLEIPASKLKREIADILKREGFIRDVEFVEDSKQGIIRVFLKYGQNNERVITGLKRISKPGLRVYAKSNEVPRVLNGLGIAIISTSQGVLTDKEARAKQAGGEVLAYVW

SEQ ID NO: 373 - protein, 166 aa, Bacillus amyloliquefaciens
  source 1..166: note = SBI01595_50S ribosomal protein L10
MSSAIDTKKVVVEEIASKLKESKSTIIVDYRGLNVSEVTELRKQLREANVEFKVYKNTMTRRAVEQAELDGLNDVLTGPNAIAFSTEDVVAPAKVLNEFAKNHEALEIKAGVIEGKVSSVEEVKALAELPSRDGLLSMLLSVLQAPVRNLALAAKAVAEQKEEQGA

SEQ ID NO: 374 - protein, 95 aa, Bacillus amyloliquefaciens; identical to SEQ ID NO: 280
  source 1..95: note = SBI01595_50S ribosomal protein L23

SEQ ID NO: 375 - protein, 556 aa, Bacillus amyloliquefaciens
  source 1..556: note = SBI01595_Arginine--tRNA ligase
MNIAEQMKDVLKEEIKAAVLKAGLAEESQIPSVLLETPKDKTHGDYSTNMAMQLARIAKKAPRQIAEEIVASFDKGKASIEKMDIAGPGFINFYMNNSYLTKLIPSVLEAGEHYGETNIGQGEKIQVEFVSANPTGDLHLGHARGAAVGDALCSVLSKAGYDVSREYYINDAGNQINNLALSVEVRYFEALGLEKPMPEDGYRGEDIIAIGKKLAEDFGDRFVHEEESERQAFFREYGLKYELDKLRSDLENFRVPFDVWYSETSLYENGKIDQALEALREKGHVYEEDGATWFRSTTFGDDKDRVLIKKDGSYTYLLPDIAYHKDKLDRGFDKLINVWGADHHGYIPRMKAAIEALGYKKGTLEVEIIQLVHLYKNGEKMKMSKRTGKAVTMRDLIEEVGLDAVRYFFAMRSADTHMDFDLDLAVSTSNENPVYYAQYAHARICSMLRQGEEQGLKPAADLDFSHIQSEKEYDLLKTIGGFPEAVAEAAEKRIPHRVTNYIYDLASALHSFYNAEKVIDPENKEKSRARLALMKATQITLNNALQLIGVSAPEKM

SEQ ID NO: 376 - protein, 191 aa, Bacillus amyloliquefaciens
  source 1..191: note = SBI01595_Protein GrpE
MSEEKQTAEQVEAAEQEEVTEQAEQAASQEQHEETAGQEEALQHQIDELQGLLDEKENKLLRVQADFENYKRRSRLEMEAAQKYRSQNVVTEILPALDNFERALQVEAESEQTKSLLQGMEMVRRQLMDALEKEGVEAIEAVGQEFDPNLHQAVMQVEDENFGSNIVIEELQKGYKLKDRVIRPSMVKVNQ

SEQ ID NO: 377 - protein, 373 aa, Bacillus amyloliquefaciens; identical to SEQ ID NO: 350
  source 1..373: note = SBI01595_protein NusA

SEQ ID NO: 378 - protein, 239 aa, Candida railenensis
  source 1..239: note = SBI01679_Exoribonuclease, phosphorolytic domain 1
MELYSPEGLRIDGRRWNELRRFECRINTHPNSSDGSSFIEQGNTKVICMVQGPMEPVLRSQLNPNQANIEINITIANFSTTERKKRLKNEKRLVELKATLERTFEQSVMCKLYPRTVIEVNIHVLAQDGGLLAGITNAITLGLIDAGIAMYDYVSSISAGLYDTTPLLDLNTLEENDMSTLTIGVIGKSEKLALLLLEDKMPLDRLESVLAIGIAGGHRIRDLMDEEVRRHGNLRLSKV

SEQ ID NO: 379 - protein, 683 aa, Candida railenensis
  source 1..683: note = SBI01679_Heat shock protein 70 family
MWKNNRFLLSGATLLYVLLAVILPLLASNGNGVGLANAEENDTDSYGTVIGIDLGTTYSCVGVMKNGKVEILANDQGNRITPSYVAFTEDNERLIGDAAKNQAPSNVENTVFDIKRLIGLKYSDDTVQKELKHLPYNIAKKDGKPVVKVEFNGEEKTFSPEEISGMILSKMKSIAEDYLGKKVTHAVVTVPAYFNDAQRQATKDAGTIAGLNVLRIVNEPTAAAIAYGLDKTDGEKQIIVYDLGGGTFDVSLLSIEGGVFEVLATAGDTHLGGEDFDFKVVNYLSKLFKKKHNIDISSNAKAISKLKREAEKAKRTLSSQMSTRVEIDSFVDGIDFSETLSRAKFEELNIAAFKRTLKPVEQVLKDAGAKKSEIDDIVLVGGSTRIPKVQELLEKFFDGKKASKGINPDEAVAYGAAVQAGVLSGEEGVDDIVLLDVNPLTLGIETTGGVMTTLINRNTAIPTKKSQIFSTAADNQPTVLIQVFEGERALAKDNNKLGKFELTGIPPAPRGVPQIEVTFSLDANGILKVEAMDKGTGKSESITITNDKGRLSKEDIDRMVEEAEKYAEQDAELKAKIESRNSLENYAHLLKGQLNDDTETGLGSKLDDEDKETLDDAVKETLEFLEDNFDTATSEEFEEQKQKLIDVANPITSKLYGGAGGAGGADAKFGDDDSDDEFDHDEL

SEQ ID NO: 380 - protein, 504 aa, Candida railenensis
  source 1..504: note = SBI01679_NADPH-sulfite reductase
KFASSSVRLVPTFNVAIVGTGPAGFYTAHHLLNKSSPKDQFVLNVDFFEKNPVPYGLSRYGVAPDHPEVKNCEEYLDNIMSKYGNNSSTNDGQLPQQNSLHRVRFFGNVEIGKDITLQDLEQKYHSIILSYGCTHSDNKLLVPGADLQGIISAREFVSWYNGSVDFYESGLKPPPLDKVDTVTIIGNGNVALDVARVLLADPDTHWTKTDISVSALEHLRKSTVKKVNIVARRGILESAFSNKEIRELLELSNGTNIRFLPIDEKLTDEIRPNAKSLNRIDKRKFQLLDKYSKLEQNTDIEVTKSWELIYLRSPIEFISNNLGSVSETKFVLNKLEKDSFTGSVKVSKTSETEIIKNELVILSIGYQGIPLEEFEQLDISFDKNRILNNEGRILSSSNSGGESLHKLVYRPGWYTSGWIKNGPKGVIATTMMESFETADSVLEDLSNNIKTHGPEDLKVGVNNIPEESRIVSWQDWIKIDQFERKLGEEHGKERIKIESKEELL

SEQ ID NO: 381 - protein, 755 aa, Candida railenensis
  source 1..755: note = SBI01679_p-loop containing nucleoside triphosphate hydrolase protein
SRNAILFDGSTISLRPKKRKEAAELDQIAVSTGESLNLIDIDGLYAKVELKRAIKSSNKIISSSASKRKGHGNGNGNGEGETAGLWTDKYRPKTFMEVCSAGNDKLYRLILHWLRKWSALVFKEELPQNDNVDHLGRPLKKILLINGPVGMGKTMVTHLLASQLGYSVQELNAANSMDPSLGSTHGGSALKTKVINALTSNSLTSKGKPTCLVIDEIDSAINSAEIIKVLTDLVHLDSRNRASAMSSISKDKKKPFQLNRPIICIANDIYQSASSGANSSFLSHYSIDKLRPHCEIITFRKPVATQRGGSGGNGLRTVKEFLMQINKWEKMGLNFRDINEIVEVCEGDLRSCINFLQFNSGGKVYEDMIEDENSQNYSESYVSNSLKDTQLSWFAIVALLFKRNQSLSKDENFGSLLNLFTNGGGKASTSANNVIDKVIKGCFNKYLDAVATQDDSAVKPAQLSDWLWFYDQMEHHGSGSSSTLLENYSSALYLKIWSMFSDINLARFSSGNTTLVPQGIDFESIELSRLNKFAMKRIIDNFPVQLRISIGNGIESSNTIPGIFLPYLDKMMTPIHSTNHNSNQSINHEKIAQIIRDFQFQLENHKDLDSGEIKLQFSPEFDTITSFNTELSPQPLATLTKLVQLKRKWLFPLIKLELDRLDSLRKRKHVTLASRNKSEEPESKTDLKLKRSRLTNSADFFKARYDDLATQTSGSLENEKTLANSNNSGTSHIWVKYHEGFSNAVRINIGWDDLW

SEQ ID NO: 382 - protein, 743 aa, Candida railenensis
  source 1..743: note = SBI01679_PAN2-PAN3 deadenylation complex subunit PAN3
MNINIDSARDTLCKNILIYGYCKYENKGCVFNHNKGAVTSGTAPTAAGSASSLALAPGAPTTAGGAAPSASTGTSTPGVDTRKRFNFNTPSFQPSSIPLASTSPAPPGNNPATGIAASSNSSKYISSPKLKEIPTFVPEGMAPNDGVAKKFNPSTASFTPSFVPGSSQEHIIQSHQPGIPGADIDGSGKGNGVMHGPGGLSGGITGGVPGLGHSPGPGQGGPGQVTGILQHGQGSSPLSGPGQGQVQGQITGIHGPGGLGGPLSGQGPQGAPSNYGNPYSAPPSSSDLFFQHQPAARAYPLQYHLYAPAPPPRLTIPLPPSETNSQQLFILNELRETLTKKNEATLQLFPRTSHLPEHVNNYHSLYPLDLSTTGLKSKLFGVPLTHFKVFSNNDGNPYTLTKVENFSVIRIQNELPFKSIKKWKSITSANVVKLQESFTSMAFGGKNSVLVMIYDYYPNALTLLEHHINRKLGGKLEPLNEEILTAYIIQITSALIQIHDKGLAARSSLDINKIIVTSKNRIKLSCVGISDILSYENDQKEIDSTSLTSHTSNLQAEDLKKFGKLVLDLSLLCIPPQLRDQGINGLKGVFTQEYITILGAIFNVNSIQEFNQTYLSHKLIDFINSAQDGQDFMELQLTSELENARLFRLLTKIDFIVDKNLNNAGDNGPNYIIRLFRDYVFNEVNEFGKPTLNLSRVLTCLNKLDAGIEEKILLVSEDEKSCIIVSYKEVKELVGGAFRSLMR

SEQ ID NO: 383 - protein, 971 aa, Candida railenensis
  source 1..971: note = SBI01679_Ribosomal protein S5 domain 2-type fold
EGDIYDEFGNLIGDAFDSDAESSEEERVEVSQLPSHSASDSKDDEDEEMNGASELEEGALVKHSLSGTFGPNVETIISRPTDEIVDEPVIQPIRSKSMKIEEDATGSVDENLEFEPSCIYSRKYMVDLAEKLPERIRNIALVGGLHSGKSTFVDMLVLHTHANSISLPKELKSFKPLRYMDNHKLEIDRGMTVKTNAITLLLSDSQERSYVCNILDTPGHPNFIDEAKSAMQAVDGVVYVVDIVEGLKNSTDKLVLTHAIKQNLPITIVLNKIDRLILELRLPVHDSYYKIRNILEDINKFIKESEYIGSYKHETDMSPLNGNVIFASATYQFTFSLQTFANLYRESFGNDINLFDFSEKLWGDVFYDEDNNQFLGSSDNGKHKRSFNSFILEPLYKVFIQSVTSDSTGKKLSQTLWNNFKLKLHKSTAKQDIQVLLKDVLSAVFATSGGGGVLSGFVDMIGSGGLNPMEKSDQLSLVGHVVKLIENSSGDMFYSLVRIVSGTLRVGDQVRVLGENYEEDEEDQRLETVTELFLAGGRYKTPVKSVGPGSIVLIGGIDRIISKGATIVLDLQLLDSIENLYIPPSYTASSVFKVAIEPAKPSQLPLLLEGFLKLNKSYLSCQIKVEESGEHVVLAPGELYMDCMLHDLRFFFTDNLEIKVSDPMTKFSETCINPSTTKITTRSANGQNLISIIAEPVNDGNLSRAIEIGENLTPKRLRNEFGWDSLASRSIWCFNSAPDNLMPNILLDDTLPGETNKELLASVKESINLGFKWSSNEGPLCDEPIRGTKFKILDAVLSEVSIQRNGTQVIPMARKACYTGIMTATPRLMEPIYSVHATCSSYGAAKAISRLLSKRRGYVLEGSDYPIPATKLFQVEGVVPVIESIGLETDVRIQTQGQAMVFLEFSKWDIVPGNPLDKDCFQPALRPVPTESLARDFVMKTRKRKGLSGEPNLLKYIDNQLFEKLKESGLI

SEQ ID NO: 384 - protein, 228 aa, Candida railenensis
  source 1..228: note = SBI01679_Ribosome assembly factor mrt4
MPRSKRSKLITLSQTDKKGRENKTRIFDEVREALDEFQFVWVLQLDDVRTPVLQDIRSDWKGSKLILGKRRVLEKALGDNANEEYKDNLHKLTKLCTGVSGLLFTNEDVETVSSYFTSYSKADYSRAKSKAPIDFTIPEGIVYSRGGQIPLEEDVPMSHSLEETMRNKFKIPTKIKAGKITIAEPYVVCRKGDNLDVRQALILKQFGVAASEFKVSMIAYYNNESSEV

SEQ ID NO: 385 - protein, 896 aa, Candida railenensis
  source 1..896: note = SBI01679_WD40-repeat-containing domain
SEDWSKKMASGGKPFWVSSPSGSTTKFSTDGKYAIVLMTHEIRVYFIGTRQCIRTIGLDLHGVIDSYLDPQDPNQLILFKNDGEIITVNWKDKISQPIVSTQLVAPTSGTSISILSIVSVHRDFLYLITGKNTSSSSYSSNSPSASISVHTRHIIKVNRASQEIHEVLEVANVAKYAISLNKKKVCFVTSNHECVLVDMASVLYASEADAEEVGAGSVSKEIIPFAYRSPITSLAVSNESVVAIGTMAGAIQILYGGITENKSQRLLKWHIDQVRSLQFTADGSYLLSGGLEKVLVFWQLDTDKTQFLPRLNGTIEKISIDANKPDFYSLMLKIPITSGSVKDENDSSKNNSNANGSSNNNTVNNNSNEEDDEEASYEVLVVSAVDLVSRLSVHGIRPKFANSNIKSTLAKTKKRFAKLNNAYDVSKLKHDYSSIFEVHPKTQQLYFPRGATIQGYDLIRNEQSFTQNAAPLLTTGKVRSESKLIDPEISSLSFSYDGQWMCTFDTISTSEVDNLISKNDLQYALKFWKYIDTSNTSTNTPSSASSASSTGHWELSTKIIDPHGPSNPILSITAAPLNYHSGLAFLTADNKGGLRIWRPRIPKEIYQNMKLATNSKLQQTAWTLRKSKPSGALVSNAVSTCWSEDGSIIILGHECSITAFNTHTLEEITQFQIPAMSGSRIRSLSILGNYLIVLSKTRITSYDLLSGTFTPLCAKVNTTLGAKNLIAIDKINELVCLAVNSYKENKESNQLVINSKILVFKPNQLKPVFTVHHDQGISSIRQFRSLFIFVDLNSRVGVVSSSTLAAKEDIEGEDSDLSNNMSKMLIQAQAAADIVNSRTVSTTSRSVSTGNVSNGHADEEIQFDRTIDINTFQPIFENLDGVQIDSLFDKIVKIIK

SEQ ID NO: 386 - protein, 609 aa, Candida railenensis
  source 1..609: note = SBI01679_Zinc finger C2H2-type
MKTDYYELLQVEITATDSELKKAYRKKALQLHPDKNRDDVEGATARFALVRAAYEVLSDPQERAWYDSHKLQILREDEIGETSGGGTYDENFYDPLVAGTMVEEIMRYFNPTLYVKLDDSLAGIYSVVGRLFDKLASEEVSHGKTQSLDGFDKWLDDTPQANVVDPSSLLYPKFGNSKSDYANDVRKFYSAWSSFQTVKVFHWKDEYRYSQAPDRKTRRLMEKENKKLRDTAKREYNEAIRNFVTFIKKRDPRIKEGLKQFELEKKKKQQRELEEQVEAARVARLQQLAQNQSAGAVQDWQKLSENELKELEDMLKEEYELKSDSEFSDDDNDEGSDFENNLYECVVCNKFFKSEKQFEAHELSNKHRKILRKLKWEMKQEGIELGIDKDDIDLDEFETASENENEGVEDFDEDEIELISEAEGAGEDILETNEDKGTDLLDLPVDNDLDSDLSLSDSSFTIPLPKSKKAKKKNKKANKSVPIQDSEEEVDDELTKLAAGLKLDNSDDDWDIKKPKKAKKKKASTPMEGDLKEAESSESRASTPVPTSSTAPKKIGKKDKNTKKEKIPNGSEICVVCDEIFTSRNKLFQHVKATGHAAAPTKVKKKGKK

SEQ ID NO: 387 - protein, 410 aa, Candida railenensis
  source 1..410: note = SBI01679_Zinc finger, RING/FYVE/PHD-type
MKRSTAYFLCYTTASIGLFAWALYDSLDKATEFFTLIVDMTDGYKLGILLNLLFLIFIGIGYLSLFLVFGSLRIIEIEHLVEKLPIFIINLLFNLTSNDNLIFNCILLGISVVFKVFHVVLTDRFDFVLMKIANLANNDSSITTKKVLRDYCANLYFWLLPLNVVADLSIAKFLVYDVFKGINSVTCLLFGFQFAVQGVELLTYYCKVLLNLYELLFFRSTDLESDSENEEEAEEDTEIENEIEQDMFADDDEDFVWERKAYYVKAVEIASSSLKAISYISFIYLLTVTSKLSLPISMLQGTYSSVVQTYKEIVQLFVFIESSKKLDTLLPNATKEELENSDNLCIICREDMHSVEEYLQYNQTEAGKKRPISSRKYPKKLACSHIIHMGCLKDWLERSENCPLCRRKVF

SEQ ID NO: 388 - protein, 244 aa, Candida duobushaemulonis
  source 1..244: note = SBI01681_Exoribonuclease, phosphorolytic domain 1
MSRMELYSPEGLRVDGRRWNELRRFECKINTHPNSSDGSSYVEQGNTKVMCVVQGPKEPPMRSQSDQNKATIEINLNVASFAGLERKVRSKNEKRMVELKTTLERTFDQSIISNLYPRTLIEINVQVLALDGGLLAVVTNAITLALIDAGVAMYDYVSAISVGLHDQTPLLDLNTLEENDMSYLTIGVVGKSEKLAMLLMEDKMPMDMLESVLGIAIAGGHRIRELMDEEVRGHGSARLTKLLS

SEQ ID NO: 389 - protein, 677 aa, Candida duobushaemulonis
  source 1..677: note = SBI01681_Heat shock protein 70 family
HNNKLWVSGLSLFLVLLCVVMPFFSANSGVALAAAEDAEDNYGTVIGIDLGTTYSCVGVMKNGKVEILANDQGNRITPSYVAFTEEERLIGDAAKNQAPSNVNNTIFDIKRLIGLEYSDKTVQKEIKHLPYKIGKKGKMPVVEVEIGGEQKSFTPEEISGMILGKMKNIAEEYLGKKVTHAVVTVPAYFNDAQRQATKNAGTIAGLNVLRIVNEPTAAAIAYGLDKTDGEKQIIVYDLGGGTFDVSLLSIEGGVFEVLATAGDTHLGGEDFDFKLVRHLAKAFKKKHGMDITSNPKAIAKLKREAEKAKRTLSSQISTRVEIDSFVDGIDFSEPISRAKFEELNIDSFKKTLKPVERVLQDAGVKKSEVDDIVLVGGSTRIPKIQELIETYFDGKKASKGIHPDEAVAYGAAVQAGVLSGEEGVDDIVLLDVNPLTLGIETTGGVMTTLINRNTAIPTKKSQIFSTAADNQPTVLIQVYEGERALVKDNNLLGKFELTGIPPAPRGVPQIEVTFSLDANGILKVEALDKGTGKSKSITISNDKSRLSKEDIDRMVEEAEKFAAQDAEIKAKIESRNSLENLVHNMKQKLDDNDEYVAKMDEDDKEELTDAIAEITEFLEENYDTATSEEFDEQKQKLVKITSKISEKIYSAGGDAGEAGDAQFGDDDSDDEFDHDEL

SEQ ID NO: 390 - protein, 452 aa, Candida duobushaemulonis
  source 1..452: note = SBI01681_NADPH-sulfite reductase
YKVAIVGSGPAGFYTAHHLLHKANGIDINVDFFDRLPTPYGLSRYGVAPDHPEVKNCEEYMDNLLAAHADRVRFFGNVNIGKNLTLLQLQAHYDSIVLAYGCTGSDNKLNVPGESLPGVISARQFVNWYNGHPDSENAPLNIPPPLDAIENVTIIGNGNVAIDVARVLLADPHLHWAPTDITTAAVELLAKSTVKRVNIVARRGLLESAFTNKEIRELLLLSKELKVRFVPLPDSILDSIRPNAKSLGRVDKRKFSMLDKASSESSAVKPDPDTKEWALKFLKSPKEFVVNPQRDDLLLATVFEENELHEDKLTQKVSVRPTGKTTSIKNELVITSIGYKGVEIDGFDSVGIAFDHKSNRLVNNGGRLLSQEAQQADPDHNFGYLKGWYTSGWIKHGPKGVIATTMMESFDTADKVLEDLSNGIHNVPTEDSDILGVLPENYVDWAGWKRIN

SEQ ID NO: 391 - protein, 751 aa, Candida duobushaemulonis
  source 1..751: note = SBI01681_p-loop containing nucleoside triphosphate hydrolase protein
ANDPPEYIPGAKTATAFDGSTFTLRPRTKKTPVVTFSDADTILDMDALYERVGLRELIRKSRKTLEGLRKPAKVENRPQLWTDKYKPASFLELCSAGNERQFRQILNFLRKWNTVVRNEPVTDEDYVDHLGRPLKKVLLVHGASGSGKTLAVHLLARQMGYVVQELNAANSMDTMHGVDTHDGGGRFANATAALKLKVQNALTVNTLDLAKTDHESAVHNTVKPTCLVVDEIDSSINAGDIVRVITDLVLADGRSAPAAQAERKGQNTKAKKPFVLRRPIICIANDIYTHSVRTYGPNPMDKLRPICETVAFKRPVTSGSKNARINVSAQKSVKELLMKVSDSEKLGLDSKAISEIFEVCEGDIRACLNYMQFTSRKLDPDMHAFLASSSGKSARKDESMSWFAVVDQIFERDSRLSKDENFDIMFDMMFSGEGKSAASGSLDKIIRGCFNKYLDVVHLQDDSLVKPAEISDWLYYYDTLNSSARDSFFYPALVTLKFWSLFSEINVRKINDENSILPNARSMDFESMELAKQNKTILRKLSDQLPLDLRLSFCGSSSNSEFYACQFIPFLDTMLTPEIGSAKIRSSLKPHEKVNVEKLAHLVKQLDIKLETSRDTETNQTSLSFAPNWDTATVFETEFAHQLFAARAKALFARRLWLFPILQSELEHTAVSGLKRRAKSETPSDAEVGKQKKARISSSVDYFKNKYDLLSTQLESPTKLPTEHISRIWVKYHEGFSNAVRKNIGWSELWA

SEQ ID NO: 392 - protein, 691 aa, Candida duobushaemulonis
  source 1..691: note = SBI01681_PAN2-PAN3 deadenylation complex subunit PAN3
MNINPDAAKDIPCKNVLIYGYCKYENKGCAFAHPQLGQSPNNTKSSTIKSAASHPGSGNMSESGDSTPATTFRSTPPTAEPKRKFNMNTPLFQPSVQSITNKFSKLSPKLKEIPIFVLASGDAAAAGNSASKDQPTQTVFASRKFNASTPSFTPSNPFDGPDQFNDAHADGYQTPDGGNANNAPSILSKTQTLPQSGPTKQQNPYLPHAGVMGGPGVGQMAPVSDYMFLHALGTLSYPLNYHLYAPAPPPRFSVKLSQHETTANNMFIPNDLRESLTKKNEATLQTISQLSLPEHVGVYHSLVPIDLTFDQISKLYQLPCHVYKVNLNVDGLPYTMRRIDYSSKLRILNEIPFATVKKWKALKNPNVVLLRDAFTSVGFITQGEPVLCLVYDYYPLANTLQEQHITRKLGGKLEPVTENLLWAYLLQLVNALLAIHKVGLNAGSSVSMSKILVTNKNRVRLGAVCVDDILEHEGIEARKGEIGSEAVLKALQLADVIRLGRVITELAGANLPVSMRNGAPERTLAALRLSSSFLFSDEFISALEALNSAQGDFELQKYFEQFLACRTLNLIDSLQDLTDHFESQLLSEVENARLFRLLAKINYVVDRWPQESELSGSFLVIKLFRDFVFQTYDEFGKPVADLSKVLTNLNKLDVGVDEKILLVSREEDSCIIVSYKEVKDIIDLTFRALFR

SEQ ID NO: 393 - protein, 972 aa, Candida duobushaemulonis
  source 1..972: note = SBI01681_Ribosomal protein S5 domain 2-type fold
MDSDDEYDEFGNYIGSGSDAEPETRENGSENAKFDGELLQDIETDVHMEDVPETHANSLAISNSLSQAFGDAETILVNPLAEGKDEPVIKTTEDHKLFVEYNLDDLPEVTYSREYMAQLCKDLPERIRNVAFVGNLHTGKTSLIDLIVQQTHTGISAAKKELQEFKPLRYLDTHKLEVERGLTIGAKFASLFVLDSRDRSYVLNVADCPGHPDFHDEIETSLNAVEGAVLVLDVLEGFTKRDKRVVSLLLKRNLPFTVVLNKFDRLILELRLPPPDFYHKVRYVLDDINAFVYHHEYAATYSHEKLVSPLNNNVVFALTTLLACFTLHTFAEVYERKFGANSRLSVAQLEKLLWGDFCYDTTTKHFRKYTGNEKGTTRTFEHLVLGPIYKLVTYSITSDPDGLVLSALLWDNFGVSLPKSSRKQDPQTLLRDVFGLVFDTTTDFAGLIVATIPDPRSELPSKLAARGINTNELPNDTLVAEVVKLVLDSDKKSHLAVVRVYLGTLVVGSEVRLVSGSNTQTESTANVTGLFVPGGRYKIPVKEVTAGNVALVSGISLAIEKTCTVFGAETPKSHLVPIHYTKCGHKSVYKVAVEPEHPRELPKLVEALRILSKAYVSAVVRVEESGEHVILAPGELYLDCFLHDVRFIADEYLLIKVSDPMTKFSETCSERSVTKITTYGVNKKTLVSITAEPVNDKKLSRAIEAGKISLARPQKTTAKVLRTEFGWDALAARSVWSFGPLDLNSPSMLLDDTLEGETDKNALVASKELMCAGFQLAVAEGPLCDEPIRNTKFKILDAVLSGSKLASASTHLIPITRNAVHTGFLTATPKLMEPTYRVNVVCTYKSQDAVHNILGRRRGWIVSETPVAATPLYEMEGYVPVIDSVGLDTDLRLYTQGQAFGTLEFARWDIVPGDPMDQDCALPAMKPVPRNSLARDFVMKTRRRKGLSGEPNLQKYLDPDLYMRLRDSGVIN

SEQ ID NO: 394 - protein, 232 aa, Candida duobushaemulonis
  source 1..232: note = SBI01681_Ribosome assembly factor mrt4
MPRSKRSKLVTLAQTDKKGKENKTRIFDEVRSALDEFRYVWILQLNDVRTPVLQEIRSDWIGSKLLLGKRRVLEKALGDTPEEEYKDNLHKLSKLCDGVSGLLFTNEAPETVLAYFNAYTKSDYCRAKSKSPLDFVIPEGIVYSRGGQVPIEEDVPMSHSLEETMRNKYKIPTKIKSGKIYLNEPFHVCSKGDTLNVTQALILKQFGVAASEFKVKTIAYFDCESSNVNKFD

SEQ ID NO: 395 - protein, 795 aa, Candida duobushaemulonis
  source 1..795: note = SBI01681_WD40-repeat-containing domain
WAVTMVSGGKPVVFPGHLSFPAVASLDGKHSIVILAHQLRVYFLQTRQCIRTVDVDVSDAVAAALDPGNDNQLVVFTPLRVFYVNWKERLDNPVVATQPLEPALPGLVDVFHLTEHAYFAVTKDDETLTVVKIDRELATTSKLFKADQVTHHAVSKQGFKLAVALESQAVAIYDLTCLFSDILLPQTAVAATMEKHTLVNKPVTCMAVSDDGVVALGGQNGVILLVYSGFGSEKATKLLRWHIDPVRCLAFSHDQQYLVSGGNEKVLVFWHLDLDRTQYLPRLSGPLDRIFVDANRPDHYLVALRVDDPSSASPVHEILTILASDLVSRLSVSPIRPNFASSARLAEARIRKKLVKTPVNLGSVKNNVTAPVAVHPTTRHLYCATGPAIQAFDVVRGEQAFVQHAAPQISTGRVKSEHNVADPTVSEVAFTSGGTWMATFDSMPTLDFDNLMLKDDTSYALKFWKLSDNGWQLALKVVDPHGPGVSVGAVVAGVDESFTTVDVKGGVRVWRPKASVLTGQNGPNGTLNQKNTPATVWTLRWSSRPTAHSARVSGCYSADGSLLVVAHGFLLTAMDPHLLQPIAFKLPVSDLPIEKIAITGSHLIIASQSRLVSFDLVKGRETQLSARVSNVGVGNLVAVDTSRELVAVATNHFTTDSDVKLQGKLMVFKPSSLEPVYTSSYPLAIASVSVASSGFVVIDTESRVGVLAPQMKSNLADTEDLVSQMEKVLVSAQAAANVLHARSAEQNAQKQASEQSTDKWTSHKLIDTAVLQPIFNNVEGVSMDTLFEKIVRAVQ

SEQ ID NO: 396 - protein, 578 aa, Candida duobushaemulonis
  source 1..578: note = SBI01681_Zinc finger C2H2-type
MKTCYYELLDVEATATDGELKKAYRKKALLLHPDKNPHDVEGANARFALVRAAYEVLSDPQERSWYDSHKSEILRDDSDYVADEPQEMVIPSISVQEILRYFNPTLYERVDDSLAGFYQVAGRLFERLAAEEVTHGKYQRLPKFDKYMDDSPNVSAIDESLFLYPRLGNSHTDYANGIRGFYNAWSSFQSVKSFNWMDEYRFSAAPDRRTRRLMEKENKKARDAGRKEYNETVRRFVGFIKKRDPRVKKGAEEFENSRRRQQQENLQRQAKQQKLQRMAEMNNHEVQDWQQMDMEELELVEEMLKQEFGSHSDETTDSEFDEFEDQLNEELFECVVCDKFFKSKSQFETHESSNKHKQNVEALREEMLREGIELGIDKDDIDLSEFETASSGNEDEESVDEVNEEVNEEDGELNEGKLPSEELEVPVAEDPTLFEVDNDIESDDSLWESSWKSEKQKKKSKKQQFKSEMEDGPETVDDDLAKLANGINLDDDDDWEVDTKKKKKPKKRGGAEKTSSPSPAPNQEAKTPPKAAGPKVTSSSEICAVCKEIFSSRNKLFQHVKKSGHAAPVKEVKKGKGK

SEQ ID NO: 397 - protein, 488 aa, Candida duobushaemulonis
  source 1..488: note = SBI01681_Zinc finger, RING/FYVE/PHD-type
MAGKGALWIAAYGAFSITAFGITLATLASKAFDYLTLMHELTDNFKLTILLNFVVCCFLLGGIFSIRVLFGELRIIEVEKIADQLPFYGLNLLFILFNDDNLLLNIVWAGVTVIAKVYHIIVLNRLDFVQLRVVNNLTRESYTPARIFRIFSLNLYVLLLAAFIFCDLVMAKILAYDVFQGVSSIGSLLFGIQFGVMGIEGFTYSGKLVLNVYELMFYRAQNHSRVNDDAELDDLDVLDDEENSEIIWENKAIYTQSFEIIASASKAAFYSVFIYILYVHSGMAPPIPIIQGSFFAVVSVAKQALQLRAYIKQSRILENLLASATHEELEAADYLCIICREDMHAPDLYEQRRGKALMPRRCPKKLQCGHILHLGCLKDWLERSDNCPLCRKKVFGHPSPASASATSSEAEPEQRPEMPTATSALGEPETITTHSHVPLFETTLANASIPVDWTALPISRSNTPGQFHIQLEPNQVGSLTKHGAGGRN

SEQ ID NO: 398 - protein, 264 aa, Pichia fermentans
  source 1..264: note = SBI01683_Exoribonuclease, phosphorolytic domain 1
MSRFDFYNSQGLRIDGRRNYELKNFESSLTTTSNFTNFSRNSQSNTTYLQMGQNKILVNIDGPKEPTNANRSRIDQDKAVLDININVTKFSKVNRQVSTNSNNLPDKQTQEWEFEIQKLFEKIIILETYPKSVINVSVTVLQQDGGILASIINCVSIALMNNSIQVYDIVSACSVGIVDQKHYLLDLNHLEEQFLTSGTIAIIGNSSLQNIEDANVCLLSLKDIFPLDLLDGFMMIGIKGCNTLKEIMVKQVKDMNINKLIEIQ

SEQ ID NO: 399 - protein, 680 aa, Pichia fermentans
  source 1..680: note = SBI01683_Heat shock protein 70 family
MLFNKNNKIVTGFLYVLLLLAIPTYLQKFNRTSSIVSAQESTQYGTVIGIDLGTTYSCVAVMKNGKTEILANEQGNRITPSYVAFTSDERLIGDAAKNQAAANPENTIFDIKRLIGLKYKDKTVQRDMKHLPYKIIEKDGKPAVEVDLHNTEEKKVFTPEEISGMILTKMKQIAEDYLGEKVTNAVVTVPAYFNDAQRQATKDAGTIAGLNVLRIVNEPTAAAIAYGLDKTEDEHQIIVYDLGGGTFDVSLLTIENGVFEVQATAGDTHLGGEDFDFKIVRHLMKIFKKKHEIDLSKNDRAIAKLKREVEKAKRTLSSQMSTKIEIDSLVDGIDFSETLTRAKFEELNMDLFKKTLKPVEQVLKDAGLEKADIDDIVLVGGSTRIPKVQQLLESYFNGKKVSKGINPDEAVAFGAAVQGGILTGEKGVEDIVLLDVNPLTLGIETSGGVMTTLIKRNSAIPTKKSQIFSTAVDNQPTVSIKVYEGERSLVKHNNLLGTFDLTGIPPAPRGTPQIEVTFVLDANGILTVSATDKGTGKSESITIKNEKGRLSQEDIDRMVEEAEKFAKEDEEIRTKIENRNKLENYAHNLKNQIETDLADKLDAEDIETLQDAIADTLEWLEDNSEDASSEEFEEKFNELSKTAFPITSKLYQQAGDAAGSDDYDGDFDDEDDDDDYFDEL

SEQ ID NO: 400 - protein, 454 aa, Pichia fermentans
  source 1..454: note = SBI01683_NADPH-sulfite reductase
MSALKTQRVTKNINIIGAGASGLYTCFKLLQLNKLNTPEDKVKLNINIWDKLPIPFGLVRNGVAPDHPEIKNCIDTFKEMFTDKTLYEDNVVKFVGNYNFTKLEEYQELIKKSDILYLANGCEQSRDYNLENKTDSNILKARDLVNWYNNYPESKSNQTPLWKTKEYWSKIKNINIVGNGNVAFDLCRLISMCKYDKEAINKSDINANFVDIIHQAPLKKINIIGRRDFESAKFGSKEFRELWGLSKYGVTGYINPKYFDHITSISKPSRVLSKKIQLTKKNSTNIDNGNMKWELKFLQSPFKIDNGNKKLLSKENIMDVNNPAKPIQTDKIVEVDNDLVILSIGTENPHMKELQQLMADNPQKISFVGWLKNKGFGTIAGTMLDTFAVVEKDYKNMDFLNNENSNELSDFEFLKDNKKLLTSWSDYEKIEQYEREVKNGKKCDSIEEMMEVIH

SEQ ID NO: 401 - protein, 1542 aa, Pichia fermentans
  source 1..1542: note = SBI01683_p-loop containing nucleoside triphosphate hydrolase protein
MGLFDIEEENFVVSRPKSLSTLSSEKINSTNDKFPGTSSKIKPIKYLNKQGKLRQFKKRSLYEEKDQYETELANNNANIEDNKFTKHYFNKSIYTETNEEKGKYGLNIKNLLKQVENENSLSLNSDKRNKLQSGFQEEELQLWVEKYKPSNIMDIIGHEDHKLDILKWLKSWSLSTNNIANRYSEENVNDPYRRPDRKVILIEGKIGIGKNTLAEILSKTCGYDLLEVNNSENNRQQLKEKVSNILFSKNTVMGKNVTNCLLVDDSSDDSSEILSVLQEFLKKDEKETNNCVNYSFNSNLSKNETKSFIKIGFLQNVLFEELDLENSKFQKEILSRLVESCNGDLRNSLNNLQFDTLENELLIGDTNTDTFLKDGSKTLINGKDKSKSWYTILVELFEPQNAQKDLSAVISKFTTLLDPFQNSYGNMINLSFDNYPVLIPNIETSSVAKYSKNFNNLSDSLFFWDVLNSFDATTGRLPQYGVVPLLNFAVYNYRIHEGSSMSYKTLNQNIIKYNVWHTKSVAVHQNTKEIIELFRNTHNYVDTSDQENIIYNDFNQNNQQLTQEYLPSIASLLSIDIMSSLKNIEKRDKILLDLYYLFKTKGIRLIRSKSKGEKGSVADDIFLSTDITEVCNFSNFDIISCNHKNIRPGDKIHTVPTRNPQLTTLKNDDAFIKLLGDSIIKNQSITAAKNFKFLLKKFEDFSHQTSKTPFSKRKLDEAVTPASKKVKTPYVSRHTDVFSFTKKNKSDKSENNQISNVNSEGRVWIKYKEGFSNALDFAPTVGSSEYSYQDKDMGEKPYNNEFLLHNDEFSHFINPNNISNPYILAQNGTNKNSQSQIELDADSKGTSRKENSGTYVDDQFLNEEDRKKKINREAQRAFRRRKEEKLKEMEQKWMNSENDKKELLQQIEKLKKVTYEMSLENKELHKKSLISASEHDNNTSTASSISHNSPIYNFPNKTEYVQYIFGMDNSQISDFIQKRSLVQSLLPHIEQVVIEETLIENDLDVDLAVNQLLSTDADTFSQENYAADKNLIKDLESLDITSDFASEKTAYWINLFPQLSYDQIKNVIKQNLHEPEEVILSALEATSVVLLDQLDVDTTENNSKDTKLINDLILFEHHPKDIIENELLMGDYEDIDEEAITQMKASILKKFISLDNNKIVEILEEHRYHIGQTIVSIIVKSKYKNADSSNLVSNSKIKGIVQRSNRGNNVKLVDPFNQSLKRRNETKSLNLIDYLEQNEYIDETVKLLEIFDKDNKLDFYTLVGPNSLHESQKPKVLPHTYKASIKKPRIIKHVSANKKRGKHSQLDIDYSDNIEKGPTVIDLHGQTVASALMTISKSLKNWWQMELNLRGNSATQAQQARSLKALYAGPLNIITGKGLHSKQGVSRIKIQCRTYLRLNSYTFEESDGFFTVTGRSAVMVFDTIEQLFLLSFFRLPNNKQCFVENFKKNKKSILQDCYVSAMKDAESYLKNVYKFDESLLSGETDPIHEILLIYTTLYLKLKKCTADMNGKLEIKQQYYNLFLSIRDDFILIQNFFTLNEWC

SEQ ID NO: 402 - protein, 1829 aa, Pichia fermentans
  source 1..1829: note = SBI01683_PAN2-PAN3 deadenylation complex subunit PAN3
MDNSNVTEDLVFNTSGHSQQIPKTPLNDNKIVNNDGAGSNNVHHYKRHLVNRLSSSKKNINTASSMRRFSFHNSGAKMSQKVKNYSKGWSHHKHSPLPTTASSIVSDDIMKYIKTDSSMAYSPFKSKENLNDLFATKKGIAYSQLSKDEQFIVDMRRIRNSAFEQKQYETALFYNDSLCCYIKDNFSLEVIKENVDYLMDFYETLNIYYMSKQYQKAVDIFQEHEIIKYLLKDHPISVYAFCLCLYELENFQQILTYLGEGNEETDSIDLQLDILNRELSNGCNKENKIDKRVLTNVQKAEYNNIDFYYKMLSKLKTNMLLLRGKALMKKNQFDMAKRELRKSVFADPTNYESFKLLISSQIMTKSEILELYNEIPFDNVIDDKRIAEVLKATYYKMISSDCINQEDFSNDVAIVDEESYDEEEAIGSFFENSDLENGNKNMNENTANMLLKTNHLLMTKEFQINIIKKMFNQCSYADCIVRCEAYLSGGYDPFNEDVITHYLTSLFEVGNKAKISKLLNTLILKFPSSWITEFAAGTRQLLFRKYLLARKHFAKATILNSSSLPSLIAYGHTFVGELDFDQSIVVYSTAATLFPGSHIPLMFLGMQHLIKRNLAMSEKYLKMALTINSTDPLLLNEIGVIHYQNTNYLEAKKYFKKASDVISKIRSNNILTEYGVEESNFHANSKIWAGIFVNLGHTYRKLNQLEKALMCFEAISVTTKPNTNTLTSMALVCMKLMKFKRCIEYLHKALEANPENTMASDLLEKAMELNMETSASVNVPLDETSALLLFFVDFAVLSDFFDVEALTFCGSLLDDSYIELKKSSSIKFLSSREPEFTSLITVFTPLMTINVTICAELRMLRXQAALNAASKNLSTSITSETKNLSAKDRLLQKALEINGLSMADYKKDEAKKQSYTLNTTTSTTELNSYSSSMHGLNSAPITPTFVPSAMNVTGFQQSSSNLAGMSPTGFFSSASRPQTPISHQIPAMSSDIKNKHFLETMAKLDESEFFIDEGLKYKIRENTFDMNNFPLDHKTPVIIQEYAQLSFMWKDFRSYNYYYKCKKMTDDGNKTYFMKRNSKIINSALPTSRNIININHSISQLKNMKSNPNVLNLDSIFLTSGFMDNSLVQVYEYYSYMVKANEYFNVDAYGTSKGTLNLTKNDLWYVLFQLLNFLKFMFQNNLHKHHGMKPIEEFISLDQFFLVESDKNNFILKYNNLGEMISNKYLKIETDGSEVVDVVEGFKESSGINNEAKIINKIGGIWKNLLISANALANDVKIADMLNYLKTPDVTLESVNAYFSFDIMADCFDRIAAFNEVLYNNLSKSINNEDFLNILLKLNIAIADYNSNDSAWLPNGTKYPLKLFYDFLFKNSSGKKDTLNYGHIIKNLCKLDSNSFDNIPFYIDFDSIIGKSTYCFENIDSLNVFRQHKDSKSKDSFNFEYIKIVNNKVSGLPLYVCKFKKDKSYLLNDSQKNLVIKKYVALSPLQNPKDNYEYLGFNDKLKLSIFRYEYAVIKNKGSPFSIENKRIYSNNLSDGSTMSMKFNSNFNSDKNVEVSIGSENMTWKHGKNKNESILFKNIENRIALVDTTVNLNYDKEILGLLKLTDFDNTSNQDKHSNHGVMNFENEKIIISSANKENYQLIKNYITDYGSYTDGQRETQLFINTYRIVSGCIIVNNKTQKLMLITYGDSHHYHFPKGGVEYNEVRYEKCESTQNYKGVPNMKYIFMENALREKWEEAGVKGRITKDLGKYYYYNDSFITDKLHQWVNKKQGKFPKSIDYYYEMTFEKVCDEWPDGNLRPRKWFDLQECLNELVSNGRYAHFKAALRCNV

SEQ ID NO: 403 - protein, 973 aa, Pichia fermentans
  source 1..973: note = SBI01683_Ribosomal protein S5 domain 2-type fold
MSDSEFEFNKNLENEDFGSNSDSSVGIKDFGADVSELSDNDNINTSGEDVDEDELVNRLEKNVLLKKKEEAPIFVDEFGSEDEDMMSDNIDDINKNDNKIKIFKQNRTIYHNGRFYKKPPRYNFSSEIMIKKTEESSIRNIAFIGPFKSGKTTLVSNILLKQHRKHFQRQKYDIENKKKYLDNSLISKYRKTTCRMNMGSFLHDEKEVVNVIDTPGHSDLWNETYMACDLADFVYIVIDAVEGFTDQALRLYNIATKILDKKVGFIINKVDRLILEVKLDEVNFYFKLMSIVNQINTLNNDNTKYSPELGNVLFSSSKLHFMFSIEKFLKLTNKQCASDDKVLKYMTARCWGNIIFNKNCFSVLNESTDNYEHLTFVQFIAKPLYNILLNGLTYNVKDLKAWVKLNFEKELMSSADFEDINDQLIKLCECIFEIDRRNSNFKKQEEDLIKVLPILEHNYDKENVEVKAYKTINYDNKIWVLCKVIGGIVTTGTILKYGEETLKIDEMAIMGGRYTRTIKKAYPNQIILLRKVFYNDDKQSYPINKMLYKADDDFVIPKHKKVISNFINEPVIKVGLQPKLLKHYEVLRVALDIIKEIYPDVRVEENEISKMFFLHACGELQLDIILFEIRYFYMGYYDRSITDFLEVKSTANLITNFKEGCAVESFASIPSSSKQFNVSVVATPLNEDLSRAIAERKFNPSELLAQQKSTELSSILRKTFKWESGISRCILSIKNTVFLVNDILADEVDEEMFEKVKIVFIEAFNEICESGPLAQEPINNTIFKLMSFEQIHEEEQDDSFEALKETFKNACKIALLSAKPILYEPYFEFSVITNTEYSRNMEYILRKRRGCEIQDIREVAGSKLIEILGTVPCIDSAGLNVDLLLVSNGSCLYQTNTINRIWQRVEGDVMDTSIELSKLEPAKNNALGRDFLMKTRKRKDIESKISSLNDSGPSLEEYIDKDLYLQLKDMNLV

SEQ ID NO: 404 - protein, 241 aa, Pichia fermentans
  source 1..241: note = SBI01683_Ribosome assembly factor mrt4
MPRSKRNRAITLSNVTKKDKETKTKNFDNLSDNLLKFKRVILLNLSNINSNNLKELRKQWDNEDLEEENKSKLVVSKKNMIIKNFDNYKEEFVNLNKLNQKLKNQHEKNATYGILYTNYDYKTVVDFFESYVKKDFAKSNSKSPISFTIPSGIVYSRGGFINQEDDIPMAHSLEPTLRNKYKIPTSLKDGKIVLDTEYFVCEQNETLSVTQCLILRQFGIAESEYRVEVMAAYDKETQDLC

SEQ ID NO: 405 - protein, 3116 aa, Pichia fermentans
  source 1..3116: note = SBI01683_WD40-repeat-containing domain
MNKKLNNVPMLLNSNFLMVNRNIHRHKSGFVSILGRTLRLPAYFTGGVAAISSYVLYKLEEGGNKIKEFWGKSSDWFEEVFGDIELFGKTNDEGNNNNNNGNNDDVVVGATLLASMSGPQESEEDTKENEEEGDDEEELVDTTGDDMVSLTRQMIEIRSILNKISSSMGSTINLPSIVVIGSQSSGKSSVLESIVGKDFLPKGANMVTRRPIELTLINTSEEDIEENMPVTTSSKSIFKKKIMSVDNSEYLIDIPQLRQFNISDFNQVKRLLIDLNLQVPSTDFISEEPIELIIKSPKVPDLQLIDLPGYIQVESINQPIELKSKIRNLCDKYLQQPNIILAISSADVDLANSTSLQAARKADPKGERTLGVITKIDLVKPELARDILLNKNYPLKMGYVGVINSKSSELDYFKKFKPYFESCQYSNKKLRKKLIKILETTMSKELKPTFIKLQQELDNTRYRFKVEYNDRQLTPRTHLSSQIDILKLSVKELQELFGRNELKSVLRQELDQEVLKILSTNYWKDLENENLKNIIINEESSSDQYWHKNVELASSTLTKLGIGRISTSIITNSIMSEINNILFVLQPESFKTEGFLYSLVNEIAIKVLNKKYYTTADQVENCIKPFKYEVDIEKREWDDSKNNSVLLLKEELKQVNNKKNELKSIINESMGNKQIHQLIQFIKQEKHRIVDESSNNRYDGGFSTTMLQLGTNFINLENREKLLKFRLKFISGKQCKDQKSMDKCPEIYLKAINEKLISTAVLFLNIELLSDFFYNFPIELDKEINKLSNEDVEMFAKQDISLVSGGKLQTPFIYNHNDIEYTSKYDLLNNSFNFYTDSDRDYSIIPFNNMIRLYCINTRQCMKTIKFNNNKVLEQIFLNSSFVENTIIYSNVINIDQINFIELVSKNGKIVYVPLDRRIDYDTDIKALDIEFINNDNKNLLITQVLNDNIVLLEDDSKSNFYIGTRINEEDSVKIVIKKTIAKEQLITYSWSNNKSNLLIIKKSENDIKRQKESKKSKKNNSQATYNTVDCSIFTTNQIDIEEPILNFTDIEINTSDSISKNSKIITQSTISNDLSKLAIGFASGVIQLISLSQADSTTTTQFLKWHCDSVLSLSFNSNSTQLFSGGWEKVFVYWDLSQGSIKKNFIPRLNGVIVSIVEPDFKENYISVLLQHVDNLTNMDLEFLLLNKSDFKSKLSVNGPLINFESDYLIKNLKGENIRPRSAIKQKTSTNTNGYNNDITIRSFTNSISSPEILYFPHCNGINTYDLNKNESLKYIQLSKSVEIGKIRNEHEDIIEPEILKIENFQIEHNNIKYEFLITLESLKSQQNSVFANTQKKANNEISYTLKFWKKSINTESNDWILQTKIISPHGVENNQLLGDIEIVDIHISSTNSNSHLNKHIFTTDKYGGVKKWAVLEIPNNVIDDNLCWKFGLINYKSSNNNLITENNFVIESLDKSLVLQSLGDRLYFLDAINMNSILKFLQLDSNIQTMQLNKVNGNIVIMTKIGLLTYDLIKNEITNGFDMYDEFKKSLISQDSTTSNTNKSLVLKNGLELKNMKRLISINPLTGDITLVVNNILSRKSMIYFFDKDLNNIILKKEHDSWISCMKWNNFNNFNFIDINSRIGIISDNISNSNNNGVVIKQEDDYDLLKPLNTANTVTEFVSDTNKKNKKELEMIIDTDTVLDSRMRLNNHTFLPLFNSVNSNTMVDTVFDTVLKINQILKKKENYTILFFAYLYKITMQAAIHENFPNSDVEYKFNNRSFNDKKFSLEAINWLEEQFKLLSTLRFTQNEVDYLKNTVAFLPKNYIDFISNDFKLTPDNEIFLTKTLSSDPSFKGLYDIDIKIKGKWEVTILYEIYILALVSESYFKFVDTDWDYEGQLEQSYNKATTLFQNGIVFSEFGTRRRRDFKTHDIIINGILKARDSNPDKFGTLLLGTSNVLLAKNYNLKPIGTVAHEWFMGIASLKKNYTNSNKIAMEYWISTFGPQNAGLALTDTFGVRQDSGDPKTYTDKISNHYLNKLGYEPYSKSICYSDSLNVEKCIDLNQYCYEKKLKCNFGIGTYFTNDFKTKSSDYKIKSEPLNIVIKIMRIDNEFCIKISDNIGKNMGDENTILKVKKELGYVDNEWVVECLRQAAGANVNPELAKKAEEQLKIWNDYYLVDGTLHKAYQDVYLDLSNDINIRWLAVINFKRIVEQKWKTIPMDVKLEIRSKILNNLDEYNKNLCMQNALAIRVMVRQDFPNQWESMLDDFNQVLTSIYMNIQNNPLNSVEKIKLYNVLLILNQIVKIVANARIGKCKIVFQEKSEMFFNILYQIYTNFSQIWISNLEQDSLNEDDMLEAMNISYICSKVLRVVITDGFKQPYVNESCNQCFDMMTRHFFDLIKNKGFFNQSISKYPILKKITIGFLKTLMRFKGAWDNDIYKLLLFKAEVVDSLIIQIIQFLNSNGEFIYVTDNESELAEVHEIFYKIGVYFFQLLKPIVQYCSPDNKITLTKYKSDMERMKEIKANLNTNIFSKPDFVLQSINSLEQYYLKLTQHDLELIIEDPEEWANEDLSSDPSFNIRKAGEIFFCTILSFYKENTEAILMDRLNSVDPSSTNDYLGLDALYTMFESSVEKLSSKADIDNIICNVLFPLVPFDNNSKQIEDIYKIVMIRRICSIISQWSENLDKNEVRQPVYAFLLKSLQIYGENSVVSSSVLQSITDVVSSSTFEKENFKNFISPLIEAIVVKVLPTVSLPHTKINALKSIQTVLSENRPLVEDENVVNVLKSLPNLWEDNVQNQSTLIVAQQLMRLTTSIIRSLNEKSYITWDLAFPMISQGIDSSSVNLERYNLLGEDAYDLLQEVLDCFPLQSALPEYYNKGMSLIGGVFLKNFMLSLENNTDLMPVLLNIFRLFAVVLPTDTFINLQEFKYVCSKMCSQLVNIRDDLFESMYNTWDHLLIKISFEKDESELKTQVLNWFVETGVYQALFKKIFLKESADDDMEDKCFHIISRLFFVNQDLFLSELNKYHMTFSIPKYENDRIEIIYQSSVYKEQSFSEVFQTLINKWYQCISLRIYNSKERKLNLLAISSIYKLLPKYEFYMLDKLEIHVKNFKPIASLWIEFLESVNEDNNGDCE

SEQ ID NO: 406 - protein, 2126 aa, Pichia fermentans
  source 1..2126: note = SBI01683_Zinc finger C2H2-type
MSRNKKKAYNHAKIMANKKKNKKKQENNGSNSKKKSKVSFNYNRQYNELLDVDDDNLAFNNNQQDIYNYYNSKNNRKDKANKRRGLFIHDRDIELEPEVDDNDNMNIPLRKRKVFFVQCKYNLNEEPKGYFDKFKDDQPKLTEAVNDEEQVDINLENSLSSSNLSDTSDIELEEEFSEVEDNEDQDESDLEEDFYEVEDTEDEDEVELYNYDNEVNTNNGIVNFEPVSDIIHTTEKLALVDPPLDDFKAFGDDQLDDVVTQLDYEIINMQQGVGHNRYNIRCFKIFGDDSYYWVNTDELTDLLSIHVGFHQSRHDAFFKHIYNKLIKEKDEADESLFNKFCDNVDMSESEISESLDYLIENVLEDEDEDGLQDMLNFAQNMNKQRTLDIDPQDIPQSKYKIKGKGKKRKLIMDENKFGPEIVQMLQEKYKLRIKHKAEKRVEKDWFVAQEHATSDNLLLKYPYGIDVLSLRAEIESFAANHKKWLVGSKRSFPSFDTSGNKTVIKFGKHFNLGHKKLVSKQRHYIQLVKTKQTIKKEFNYLHVDLLCRQRQIFMRKDVKMPRDLAVRFNGEQLETEKVKRSMQDGAVVAEGAKQLTSENLGFRMLSKMGWSKGMALGNKDLDAIKEPVKAIIKKGRKDMTFFSKLGLFTNDNSNVLKGLLNIEANECHIDDIDPDSINTEAMIKRFEDSCQYIEHFFGKLEKDLDQKTEEITALNLRINKVDKEKESLEEQIKSFEHKTSKLTKEKDEISTSINDVCKALHVKSTNPKDQCEELKSAVQNSKEELEAFASICVFKKSCNAQNLTLKDLFKNKVQNCNKELLPSLEESLSASKLSAKIVSSEENKAIMDTNKKLNDLHQFLTDLSVFGMKIGPNLLDMFYQGMEKSKYSNYLKNDLGIHGFKNKTDIDAIPVLVENSKNFQEISLSNFKTINNHLLKLLEHQEKDLIIKSKDEKITLIMAMLGSEADQMYEKEVKKEVSLSRMKELNLKELEGKTLLFLKALLKCILHTTGIEFTTFEDVVQKFKKINAIVQHERGLLINFAELMKGVSTIDEKLDFEQELSQFISKEAGKNILKKQLENIANSIYDKVFQYDEILKNANSTNGYDEYDESGEQSEEYYEDRHNDGSIKKLALKYHPDKNPDRIEEFTEIFAQLSIAYETLSDEQERSWYDSHKDTLNENNSNGGNQYEDESYVNDCGVNADDIHAFMNREYFDRNDDSVAGMYQVAAKVFLRIVKDEILFGKRYGMKEFEKCADDSFLSHAANNGYIQSLSDFKTKTLLYPLFGYTETSYADLKHFYKKWSSFQTVKQFHWKNEYRINKNYDRRIKRELNKRNEKIRNEHKTQYNKTVKEFVNFIKKLDTRLKQGKKKEQDAIRNKQLENLKRMKEMTDKQKQEALAEKTKNEFLEQSWQHVDEDKLNKLEREFLSDVSDENDRDEGQDHPDEDFFIHKIGLEELKRKMVEDEFILNQKGEVIDADVDYVDSGDQFFSAKEDEIDDIDSLERQLQEINAQLEMDGFLKKKPVEVEKKSSKSKKQKKKENKLKREKEKEKSNELEVEELIEQDHPEEEVEVNELELLLNSLSSKKAESTTKAYDSDDDWGNTKKSKKKKDKKSKPLVKDPVNEPVQENIPKTTIPFVYMSNQQHNNEEIPTGNSNVSNLSTALKSVHINGNNITTTDQSYIDFGNIDQQQLQEQQITPNNVNLNTHVNRVPQQQVSRSPQSPSLFRNNGSPTTTYMQQRAGSLGNNSPSFLQNNSYTPQQPSRLQQQVIHENINQRKLNEERENAAKLQQENFTNQLSQAVPDIDNSRLLKFFSHQPTSGYTLFSHRSAPNGFKVAIVLSELSMPYRTFFLDFNKGEHRCPEFVSINPNARVPALIDHELNNFPIWESGAIILHLVNKFYKQYNQPLLWSDDLAEQSQITSWIFFQASGHAPMIGQALHFKYFHTTKIQSAIDRYIEEVRRVYGVVEMALAEKRESLILDLDTENAQSYSSGTTPLSNSRFFDYPVWLVGDKITVADLSFVPWNNVVDRIGINIKVEFPEVYKWTKHMMRRQAVIKALRENDFKKKKAKNILIKSQQKLDKNKQMKGIILLDSVEDEKHKDNQRKANRKTEYDSWEVPPVVLEMALL

SEQ ID NO: 407 - protein, 665 aa, Pichia fermentans
  source 1..665: note = SBI01683_Zinc finger, RING/FYVE/PHD-type
MFGNIKDYKLILYGIFTYGVFAITLMNSLAKSSNLLQLLLQLFSSDFNLVGYVDGGPPSYNISFLITLNFILYNSYVFVNIILIKWLLFGELRLIETENINTRFVSTVINDIVMFTFLMKTHSLDKDDILGNIDLFIIKSKSNFTLNIAIYIVISLSVRIIHWINLDRLEMIYSRLTNARGADDNSNYNEEVLTGDSLEEDKRQLKIGNIYFVMNFYRSRYFLILLILTLGSLKSAWEFNKPRSKISDASSGIDILAFAFRIFFTLLTIKTVSTWCFSVVNLLDAYKSKCQQDSIVLKLRESMRQINENTVSDEEGSDSSLESNISNEEDEYLDSDDEGIFGYNDTFEAKYRIELMISLVSNVLNIGARLVIACTYSKFSTLSTLISNQTISEVYSAFSLVQNLMNIYDKYEQLQDLPSPTESECKEDDTCIICMDSLYPTKYQLKVAMNKHRVAMEDNIIQDALIKYNPKTLPCGHFLHLYCLKTWFERSKNCPMCRMDIFDAETGKIRRQVFYKNRIKTVDEKNSNSGNIEEPGLVPLVTGQSVENENFTSENAENDYFKPNVEPDEIQEIDDSNSSFEYKDFFDQRKGMQYRMLHFSKSKIPVYDVDGDELTIAMYKGYTKDSLISLKHNMKTSGEFEKVDNEDSDTKHIKIEISTTGFIPI

SEQ ID NO: 408 - protein, 394 aa, Bacillus pumilus
  source 1..394: note = SBI01819_ Phosphoglycerate kinase
MNKKSVKDIDVKGKVVFCRVDFNVPMKDGEVTDDTRIRAALPTIEYLTGQGAKVLLASHLGRPKGQVTEELRLTPVAKRLQELLGQEVKKADEAYGDNVKKQISDLKEGDVLVLENVRFYPGEEKNDPELSKAFADLADVYVNDAFGAAHRAHASTAGIAAYLPAVSGFLMQKELEVLGKAISNPDRPFTAIIGGAKVKDKIGVIESLLDKVDNLIIGGGLAYTFVKALGHEVGKSLLEEDKVDLAKSFMDRAKEKGVNFLIPTDVLVADDFSNDANTSIVPISEIPSDLEALDIGTETREKYADVIKNSKLVVWNGPMGVFEIDAFAKGTKAIAEALAEAKDTYSVIGGGDSAAAVEKFGLADQMSHISTGGGASLEFMEGKELPGVTALNDK

SEQ ID NO: 409 - protein, 132 aa, Bacillus pumilus
  source 1..132: note = SBI01819_30S ribosomal protein S8
MVMTDPIADLLTRIRNANMVRHEKLEVPASKIKREIAEILKREGFIRDVEYVEDSKQGIIRMFLKYGQNNERVITGLKRISKPGLRVYAKSNEVPRVLNGLGIAIISTSQGVLSDKEARAKQAGGEVLAYVW

SEQ ID NO: 410 - protein, 166 aa, Bacillus pumilus
  source 1..166: note = SBI01819_50S ribosomal protein L10
MSNAIDTKKVVVDEITSKFKDSMSTVIVDYRGLSVSEVTELRKQLRDAGVEFKVYKNTLTRRAVEQVELTGLNDFLTGPNAIAFSNEDVIAPAKIINEFAKSHEALEIKAGVIEGNVATVEEVKALAELPSREGLLSMLLSVLQAPVRNLALATKAVAEQKEEQGA

SEQ ID NO: 411 - protein, 95 aa, Bacillus pumilus; identical to SEQ ID NO: 252
  source 1..95: note = SBI01819_50S ribosomal protein L23

SEQ ID NO: 412 - protein, 557 aa, Bacillus pumilus
  source 1..557: note = SBI01819_Arginine--tRNA ligase
MNIAEQVKDALKEEIIAAVVKAGLADESQVPDVLLEVPKDKTHGDYSTNMAMQLARIAKKAPRQIAEDIVKAFDKGKASIEKLDIAGPGFINFYMNNQYLTKLIPAVLEAKEAYGETNTGGGQKVQVEFVSANPTGDLHLGHARGAAVGDSLCNILDKAGFDVSREYYINDAGNQINNLALSVEVRYFEALGLEKEMPEDGYRGEDIKGIGQKLADEFGDRFVHEPEEQRMKFFREYGLKYELEKLRVDLENFRVPFDVWYSETSLYENGKIEPALETLRAKGYVFEEDGATWLRSTDFGDDKDRVLIKKDGSFTYLLPDIAYHKDKLDRGFDQLINIWGADHHGYIPRMKAAIQALGYPADKLEVEIIQLVHLYKNGEKMKMSKRTGKAVTMRDLIEEVGLDATRYFFAMRSAATHMDFDLDLAISTSNENPVYYAQYAHARICSMLRQGEEKGYEPNLEKADFSHIQSEKEYDLLKIIGSFPEVVAEAAEKRIPHRVTNYIYDLASALHSFYNAEKVIDVENETKTTARLSLMKATQITLANALKLIGVSAPEKM

SEQ ID NO: 413 - protein, 185 aa, Bacillus pumilus
  source 1..185: note = SBI01819_Protein GrpE
MSEEKQTPEQEAEVEAQEEAVQADTEEVTHDEQSAFQEKIDELQQLLDEKENKILRVQADFENYKRRARTEVETVQKYRSQHVVSDLLPALDNFERALGIDPDNEQTKSLLEGMQMVYRQLVEALKNEGVEPIEAVGKEFDPNLHQAVMQVEDENVDSNIVVEELQKGYKLKDRVIRPSMVKVNQ

SEQ ID NO: 414 - protein, 371 aa, Bacillus pumilus
  source 1..371: note = SBI01819_protein NusA
MSSELLDALTVLEKEKGISKEIIIEAIEAALISAYKRNFNQAQNVRVDLNRETGTIRVFARKDVVDEVYDSRLEISVDDAANINPNYMVGDVVEIEVTPKDFGRIAAQTAKQVVTQRVREAERGVIYTEFIDREEDIMTGIVQRIDSKFIYVSLGKIEALLPVNEQMPNEDYKPHDRIKVFITKVEKTTKGPQIYVSRTHPGLLKRLFEIEVPEIYDGTVELKSVAREAGDRSKISVRTDDPDVDPVGSCVGPKGQRVQAIVNELKGEKIDIVHWSNDPVEFVANALSPSKVLDVIVNEEDKATTVIVPDYQLSLAIGKRGQNARLAAKLTSWKIDIKSETDARELGIFPRTEDSESLFLEAEPVAEESDE

SEQ ID NO: 415 - protein, 394 aa, Bacillus amyloliquefaciens; identical to SEQ ID NO: 371
  source 1..394: note = SBI02181_ Phosphoglycerate kinase

SEQ ID NO: 416 - protein, 132 aa, Bacillus amyloliquefaciens; identical to SEQ ID NO: 372
  source 1..132: note = SBI02181_30S ribosomal protein S8

SEQ ID NO: 417 - protein, 166 aa, Bacillus amyloliquefaciens
  source 1..166: note = SBI02181_50S ribosomal protein L10
MSSAIDTKKVVVEEIASKLKESKSTIIVDYRGLNVSEVTELRKQLREANVEFKVYKNTMTRRAVEQAELDGLNDVLTGPNAIAFSTEDVVAPAKVLNEFAKNHEALEIKAGVIEGKVSSVEEVKALAELPSRDGLLSMLLSVLQAPVRNLALAAKAVADQKEEQGA

SEQ ID NO: 418 - protein, 95 aa, Bacillus amyloliquefaciens; identical to SEQ ID NO: 280
  source 1..95: note = SBI02181_50S ribosomal protein L23

SEQ ID NO: 419 - protein, 556 aa, Bacillus amyloliquefaciens; identical to SEQ ID NO: 375
  source 1..556: note = SBI02181_Arginine--tRNA ligase

SEQ ID NO: 420 - protein, 191 aa, Bacillus amyloliquefaciens; identical to SEQ ID NO: 376
  source 1..191: note = SBI02181_Protein GrpE

SEQ ID NO: 421 - protein, 373 aa, Bacillus amyloliquefaciens; identical to SEQ ID NO: 350
  source 1..373: note = SBI02181_protein NusA

SEQ ID NO: 422 - protein, 394 aa, Bacillus licheniformis
  source 1..394: note = SBI02185_ Phosphoglycerate kinase
MNKKSVKDIDVKGRVVFCRVDFNVPMKDGKVTDDTRIRAALPTIQYLTEQGAKVLLASHLGRPKGQVSEELRLTPVAARLGELIGKEVKKADEAYGDAVKAQISEMKDGDILVLENVRFYPGEEKNDPELSKAFADLADVYVNDAFGAAHRAHASTAGIAEHLPAVAGFLMEKELEVLGKALSNPERPFTAIIGGAKVKDKIGVIESLLEKVDNLIIGGGLAYTFVKALGHEVGKSLLEEDKIELAKSFMDRAKEKGVNFYMPTDVLVADDFSNDANTKVVPVSEIPSDWEALDIGEETRKTYADVIKNSKLVVWNGPMGVFELDAFAKGTKAVAEALAEAKDTYSVIGGGDSAAAVEKFGLADKMSHISTGGGASLEFMEGKELPGVKALNDK

SEQ ID NO: 423 - protein, 132 aa, Bacillus licheniformis
  source 1..132: note = SBI02185_30S ribosomal protein S8
MVMTDPIADMLTRIRNANMVRHEKLEIPASKLKREIAEILKREGFIRDVEFIEDNKQGIIRVFLKYGQNNERVITGLKRISKPGLRVYAKSNEVPRVLNGLGIAILSTSQGVLTDKEARAKQAGGEVLAYVW

SEQ ID NO: 424 - protein, 166 aa, Bacillus licheniformis
  source 1..166: note = SBI02185_50S ribosomal protein L10
MSSAIETKKVVVEEITSKLKESKSTIIVDYRGLNVAEVTELRKQLREANVEFKVYKNTMTRRAVEQAELDGLNDFLTGPNAIAFSTEDVVAPAKVLNEFAKKHEALEIKAGVIEGKVSTVEEVKALAELPSREGLLSMLLSVLQAPVRNLALATKAVAEQKEEQGA

SEQ ID NO: 425 - protein, 95 aa, Bacillus licheniformis
  source 1..95: note = SBI02185_50S ribosomal protein L23
MKDPRDVLKRPVITERSADLMTEKKYTFEVDVRANKTEVKDAVEQIFGVKVEKVNIMNYKGKFKRVGRYSGMTNKRRKAIVKLTEDSKEIEIFEA

SEQ ID NO: 426 - protein, 556 aa, Bacillus licheniformis
  source 1..556: note = SBI02185_Arginine--tRNA ligase
MNIVEQMKDVLKQEIKEAVMKAGLAAESEIPEVVLEVPKDKAHGDYSTNMAMQLARIAKKAPRNIAEEIVASFDKGKASIDKLDIAGPGFINFYMNNQYLTKLIPAVLEAGEAYGETNIGGGERVQVEFVSANPTGNLHLGHARGAAVGDSLCNVLEKAGYEVSREYYINDAGNQINNLALSVEARYFQALGKDKPMPEDGYHGEDIKEIGRKLADEFGDRFVHEEESERLAFFREYGLKYELGKLREDLENFRVPFDVWYSETSLYQNGKIDQALEALREKGHIYEEDGATWFRSTAFGDDKDRVLIKKDGSYTYLLPDIAYHKDKLDRGFQKLINVWGADHHGYIPRMKAAIEALGYDKETLEVEIIQLVHLYKNGEKMKMSKRTGKAVTMRDLIDEVGLDAVRYFFAMRSADTHMDFDLDLAVSTSNENPVYYAQYAHARICSMLRQGEEKGISFEGNLDLTKIASEKEYDLLKVIGSFPEAVADAAEKRIPHRITNYIFELASVLHSFYNAEKVLDPADEEKSRARLSLMKATQITLNNALKLIGVSAPEKM

SEQ ID NO: 427 - protein, 194 aa, Bacillus licheniformis
  source 1..194: note = SBI02185_Protein GrpE
MAEEKQTEELNEQEELNETEAETAEAEQTAAEADAPAEDTQTEMLEKQLKELQERLEEKENKLLRVQADFENYKRRARLDLEAAEKYRSQRIISDLLPALDNFERALQIDPDNEQTKSLLQGMEMVHRQILEALKNEGVEQIPSVGEQFDPNMHQAVMQVEDEAYESNAVVEELQKGYKLKDRVIRPSMVKVNQ

SEQ ID NO: 428 - protein, 372 aa, Bacillus licheniformis
  source 1..372: note = SBI02185_protein NusA
MSSELLDALTVLEKEKGISKDIIIEAIEAALISAYKRNFNQAQNVRVDLNRDTGSIRVFARKDVVDEVYDPRLEISIEDAVNINPNYIVGDVVEIEVTPKDFGRIAAQTAKQVVTQRVREAERGVIYSEFIDREEDIMTGIVQRIDNKFIYVSLGKIEALLPVAEQMPNEVYKPHDRIKVFITKVEKTTKGPQIYVSRTHPGLLKRLFEIEVPEIYDGTVELKSVAREAGDRSKISVRTDNPDIDPVGACVGPKGQRVQAIVNELKGEKIDIVHWSNDPVEFVANALSPSKVLDVIVNEEDKATTVVVPDYQLSLAIGKRGQNARLAAKLTSWKIDIKSETDARELGIYPRELEEEEPEELFLESETPESDE

SEQ ID NO: 429 - protein, 394 aa, Bacillus pumilus
  source 1..394: note = SBI02354_ Phosphoglycerate kinase
MNKKSVKDIDVKGKVVFCRVDFNVPMKDGKVTDDTRIRAALPTIEYLTGQGAKVLLASHLGRPKGQVTEELRLTPVAKRLQELLGQEVKKADEAYGDNVKKQISDLKEGDVLVLENVRFYPGEEKNDPELSKAFADLADVYVNDAFGAAHRAHASTAGIAAYLPAVSGFLMQKELEVLGKAISNPDRPFTAIIGGAKVKDKIGVIESLLDKVDNLIIGGGLAYTFVKALGHEVGKSLLEEDKVDLAKSFMDRAKEKGVNFLIPTDVLVADDFSNDANTSIVPISEIPSDLEALDIGTETREKYADVIKNSKLVVWNGPMGVFEIDAFAKGTKAIAEALAEAKDTYSVIGGGDSAAAVEKFGLADQMSHISTGGGASLEFMEGKELPGVTALNDK

SEQ ID NO: 430 - protein, 132 aa, Bacillus pumilus; identical to SEQ ID NO: 250
  source 1..132: note = SBI02354_30S ribosomal protein S8

SEQ ID NO: 431 - protein, 166 aa, Bacillus pumilus
  source 1..166: note = SBI02354_50S ribosomal protein L10
MSNAIDTKKVVVDEITSKFKDSLSTVIVDYRGLSVSEVTELRKQLRDAGVEFKVYKNTLTRRAVEQVELTGLNDFLTGPNAIAFSNEDVIAPAKIINEFAKSHEALEIKAGVIEGNVATVEEVKALAELPSREGLLSMLLSVLQAPVRNLALATKAVADQKEEQGA

SEQ ID NO: 432 - protein, 95 aa, Bacillus pumilus; identical to SEQ ID NO: 252
  source 1..95: note = SBI02354_50S ribosomal protein L23

SEQ ID NO: 433 - protein, 557 aa, Bacillus pumilus
  source 1..557: note = SBI02354_Arginine--tRNA ligase
MNIAEQVKDALKEEIIAAVVKAGLADESQVPDVLLEVPKDKTHGDYSTNMAMQLARIAKKAPRQIAEDIVNAFDKGKASIEKLDIAGPGFINFYMNNQYLTKLIPAVLEAKEAYGETNTGGGQKVQVEFVSANPTGDLHLGHARGAAVGDSLCNILDKAGFDVSREYYINDAGNQINNLALSVEVRYFEALGLEKEMPEDGYRGDDIKGIGQKLADEFGDRFVHESEEERMKFFREYGLKYELEKLRVDLENFRVPFDVWYSETSLYENGKIEPALETLRAKGYVFEEDGATWLRSTDFGDDKDRVLIKKDGSFTYLLPDIAYHKDKLDRGFDQLINIWGADHHGYIPRMKAAIQALGYPEDKLEVEIIQLVHLYKNGEKMKMSKRTGKAVTMRDLIEEVGLDATRYFFAMRSAATHMDFDLDLAISTSNENPVYYAQYAHARICSMLRQGEEKGYEPNLEKADFSHIQSDKEYDLLKIIGSFPEVVAEAAEKRIPHRVTNYIYDLASALHSFYNAEKVIDVENETKTTARLSLMKATQITLANALKLIGVSAPEKM

SEQ ID NO: 434 - protein, 185 aa, Bacillus pumilus
  source 1..185: note = SBI02354_Protein GrpE
MSEEKQTPEQAAEVEAQEEAVQAETEEVKHDEQSAFQEKIDELQQLLDEKENKILRVQADFENYKRRARTEVETVQKYRSQHVVSDLLPALDNFERALGIDPDNEQTKSLLEGMQMVYRQLVEALKNEGVEPIEAVGKEFDPNLHQAVMQVEDENYDSNIVVEELQKGYKLKDRVIRPSMVKVNQ

SEQ ID NO: 435 - protein, 371 aa, Bacillus pumilus
  source 1..371: note = SBI02354_protein NusA
MSSELLDALTVLEKEKGISKEIIIEAIEAALISAYKRNFNQAQNVRVDLNRETGTIRVFARKDVVDEVYDSRLEISVDDAANMNPNYMVGDVVEIEVTPKDFGRIAAQTAKQVVTQRVREAERGVIYTEFIDREEDIMTGIVQRIDSKFIYVSLGKIEALLPVNEQMPNEDYKPHDRIKVFITKVEKTTKGPQIYVSRTHPGLLKRLFEIEVPEIYDGTVELKSVAREAGDRSKISVRTDDPDVDPVGSCVGPKGQRVQAIVNELKGEKIDIVHWSNDPVEFVANALSPSKVLDVIVNEEDKATTVIVPDYQLSLAIGKRGQNARLAAKLTSWKIDIKSETDARELGIFPRTEDSESLFLEAEPVAEESDE

SEQ ID NO: 436 - protein, 239 aa, Meyerozyma guilliermondii
  source 1..239: note = SBI02945_Exoribonuclease, phosphorolytic domain 1
MSRLELYSPEGLRVDGRRWNELRRFECKINTHPNSLTGSSYVEQGNTKVICMVEGPLEPETRSQVDVSRATIEVNIAVASFSTIERKKRLKNEKRIIELKATMERTFEQSVICKLYPRTVIKVNLHVLAQDGGMLATMINATTLALIDAGIAMYDYVAAVAAGLHNETPLLDLNTLEENDMSHLTLGVIGKSEKLAVLMLEDKMPMDRLEPVLAIGIAGSHRIRELMDQETRRHGERRV

SEQ ID NO: 437 - protein, 674 aa, Meyerozyma guilliermondii
  source 1..674: note = SBI02945_Heat shock protein 70 family
STKMWISGFTLFYVFLAVMLPLFSKNGGLVLADDSNDTENYGTVIGIDLGTTYSCVGVMKGGKVEILANEQGNRITPSYVAFTDEERLIGDAAKNQASSNVENTVFDIKRLIGLKYDDKIVQREIKHLPYKIEKKSGKPVVKVDYQGDQKTFSPEEVSGMILGKMKSIAEDYLGKKVTHAVVTVPAYFNDAQRQATKDAGTIAGLNVLRIVNEPTAAAIAYGLDKTDKEKQIIVYDLGGGTFDVSLLLIEGGVFEVLATSGDTHLGGEDFDFKIVRYLAKQFKKKHNIDVLTNPKAMSKLKREAEKAKRTLSSQMSARVEIDSFAEGIDFSETISRAKFEELNIDSFKRTLKPVEQVLKDAGVKKSDIDDIVLVGGSTRIPKVQELLEKFFDGKKASKGINPDEAVAYGAAVQAGVLSGEEGVDDIVLLDVNPLTLGIETTGGVMTTLINRNTAIPTKKSQIFSTAADNQPTVLIQVYEGERAMAKDNNKLGKFELTGIPPAPRGVPQIEVTFSLDANGILKVEAMDKGTGKSESITITNDKGRLSKEDIDRMVEEAEKYAQQDAEVKAKIESRNSLENYAHLLRGQLKDESETGLGAKLSDEDKETLDDAVKETLEFIEDNYDTATSEEFEEQKQKLIDVANPITAKLYGGAPDDGAQFGDADSDDDFDHDEL

SEQ ID NO: 438 - protein, 488 aa, Meyerozyma guilliermondii
  source 1..488: note = SBI02945_NADPH-sulfite reductase
QKRFFSTASHIPSYKIAIVGSGPAAFYTAHHLLNRSSPEHDFRLNIDFFERLPAPYGLSRYGVAPDHPEVKNCEEYLDDIMQKFQNHDKHNVRFFGNVDVGNDVSLQDLDKSYHSVVLAYGCTTADNSLNIPGENLPGVISARQFVNWYNGFPDKYFGGFVAPPLHKINDVTIIGNGNVALDVARVLLADPETHWTPTDMLQNAVEILKQSAVKNVNIVARRGILESAFSNKEIRELFEVAKANNVKFITLAPELMDGIDPKSLGRVDKRRLDILNKFSKQEVVGDRTWSLKYLMSPKEIVPSETDPELLSGVGFAQNKLEKDSLTHKTSIKESGEPPVFLKTDLLLLSIGYKGSPLRGFEDIGIFFDKKQNRILNRRGRVLSTASSSEETHQPVYKKGWYTSGWIKNGPQGVIATTMMDSFDTADTILEDLSNHVYSSSSPLSIDEKLEKLDYVNWNSWMKLNQKEVDEGKLLGKSRVKYSKVKEML

SEQ ID NO: 439 - protein, 701 aa, Meyerozyma guilliermondii
  source 1..701: note = SBI02945_p-loop containing nucleoside triphosphate hydrolase protein
SGKVVKLRKRAPKASESTDSLGVSEMENFIDMDKLFKTVELRNSLKSSIKASKQPSQSKNVPLLTEKYKPASFVDLCSLGNDKQYRMVLQWLKKWSPMVFGEPIPAPESKTTYNRDFEDPYGRPHKKIMLIHGPPGIGKTAAAHVFARQMKYNVQEINAANSMDINQLIAESDKKGSRGAYASLKLKITNALTSNSVVGKGKPTCIIIDEIDTSPNSNEIIRVLSDIVRLDGRSNKSSKKPFLMQRPIICIANSNYLTRQGNNMDVLRSISESVAFKKPNISSGSKKSNGNALKNFKEHLIHIAKKEDLNLDYRAIGEIVEICEGDMRACLNYIQFNSQKLNVPIMETKPGGGPNKDSDISWFALVNLLFKRNSNFSKEENFQQLFDLLLNGGGVSSLSSSGTFDKVLTGCFSRYLDVIHFQSDTLFGPAELSDWVSLYDRRGSHRLEADYMPSLICLKIWSLFSCPDPNLNPTNELIPNGRSIDFESYEALKSNEQILEHVVGNLPPSLVNALGVSKGGKETLAGSLLPYLDKMIMADPICTGSKSMLTLSAPERNCLEKVSAIVKDLDLRLESHKAMDSNQVLLKMNPDWDSIVHFQNHSQGKFAAKQMRRKVLFPLIALQLEKDKIVKNTTKRHLYGQKESEKKRSKLEKIDEFFQSLRPRETGPTKSATHELTRIWVKYNEGFSNAVRKNIGWTDFW

SEQ ID NO: 440 - protein, 597 aa, Meyerozyma guilliermondii
  source 1..597: note = SBI02945_PAN2-PAN3 deadenylation complex subunit PAN3
AKGTLCKNILIYGYCKYENKGCAFSHRRNNNANLGPGATPVKSVATAPTSDKRKFNVNTPSFQPSTAPVQGLANKFAGLLPKVKDIPVFVPSGTNNQCQLALCRMFPNESSILRHLRLLPVNQFPLPPPQNTSSPPTNPYLMNQPGPPTDMYYQSAYPLQYHLYAPAPPPRLAITHSLHQVDAHSLFIDSELRETLQKRNEATLQSYPGGPEIVDVYHTVVPIAAEGVSKIWKVSSSVYKGVSNVDGNVYALRKIEDFKIINETPFRTIKRWHGLQSANIVKLQDAFTTVAFGSPSLVVAYDYYPNASTLLEQHVNRRLGGRLEPLTEDILWLYLTQLVNAVRTVHKKKLAARSSLDLSKIIVTTTNRIRLAAIGMSDILNWEADDAEIARVGLPTYMENLQQEDIRNMARLMVDLTTVMNPVVQNDIFKLKSSGLSTDFVAAVQDLSNTDDLESYIRKHLAIRLLDVVDMLEDLNDYLESQLSTELENARLVRLMTKINFIVDRPEWDNEATAAAAGWTENGPKYLLKLFRDFVFFQTDEMGKPVTDLSRVLVTLNKLDAGIDEKFLLVSRDEKTCIVVSYKEIRDLLESVFRTIT

SEQ ID NO: 441 - protein, 960 aa, Meyerozyma guilliermondii
  source 1..960: note = SBI02945_Ribosomal protein S5 domain 2-type fold
DDDDYDEFGNLIGDPLDSDADSSSDAESISHIDSRDHSGENPLNSVPIDKDAKTASLRDNDNSMAITRNEGKQVGLKSTFGPEVETIIVKPTMEQKDEPVILPDIQKKLRLVLDESLPEVVYSREYMLQTMSSLPERIRNIAVIGNFHSGKTSLIDLFIHQTHPTIKPSTSLKSFKPLRYLDNHFLELHRGMSIKLSPVTLLLPDLNDKSYILNIVDTPGHFDFADETIAALEATDGAVFVLDVVEGLTPRDKALISQVMKRDMSMTFVLNKIDRLILELRLPPLDTYLKLQYIVDDVLSFIEENEFYSAYSHKFEMSPASGHFLFASATYCFCFSLETFGSLYAKNHENLDVADFSEKLWGDWYYDSTTNNLTSKPHQRLERTFVKLVLGPVYKLFTASLTSNSAGESIASLLWLNFGIQLDKSKYKQDVQILLKDVFHTTIGTASFVDLVSICIVSPKKIPTRQTNSPILAHIVKLIEHADGLGFDSLVRIVKGTLTKGQKVTVYGDNYVEDDENYRSEIIDAILVPGGRYNFEVEEAGEGSIVLVKGIDSIISKSGTLALSDDYIFPSQSYSKNSVFKVAIEPFVPNDLPKMLDGLRKVSKSYLACSVKVEDSGEHLVFGSGELYLDCVLHDLRNFFTDDLEIKVSDPMPKFSETCSETSFTVISTQSGENSISVIAEPVNDTKLSLAIENGKINLNEDIKTLSKKLRLEYGWDALASRSVWCFGPDDIQSPSILLDDTLEAETDKKLLYSAKPHINLGFKWSVNEGPLCDEPIRNTKFKILDATISGAEISRGGARLIPLSRKACYTGFLTASPRLMEPYYRVHGTCPHRAIAVFTALLGKRRGYLESETPIPGTGLFQVVGLVPVIEAVGLETEIRLNTQGQAMCFLVFDLWNIVPGDPLDETVPLPTMKPVPDESLARDFVLKTRRRKGLSGEPSLQKYVDQDLYHSLKHNGLV

SEQ ID NO: 442 - protein, 231 aa, Meyerozyma guilliermondii
  source 1..231: note = SBI02945_Ribosome assembly factor mrt4
MPRSKRSKLVTLAQTDKKGKENKIRIFDEVRSALDEFRFVWVIRLDDVRTPVLQDIRSDWTGSKLLMGKRKVLEKALGEKPEDEYKDNLHKLSKSCTGVSGLLFTDETPETVTAYFSAYSKQDYSRAKTKAPIDFVIPEGIVYSRGGQIPIEEDVPMSHSVEETLRNKLKVPTRIKSGKITLSEPYVVCRKGDTLDVRQALLLKQFGVAASEFKPELVAYFDNEDNQVTKV

SEQ ID NO: 443 - protein, 767 aa, Meyerozyma guilliermondii
  source 1..767: note = SBI02945_WD40-repeat-containing domain
EWASRMVLGGRLPQLEGTPAFPAVFSADGKHQIVVFTHQIRVYFLATRQCVRCIDINIGLIVDMCLDPGSASQILLFSNLGGVFSVNWKEKVASPVTEVFVMSPPQGYVLASASCYGDRFVGVFQSTKKKGPSTALVQTFLKENEGETKVVVDDVTPVFSWSFDKSQVVFVTTSHEVVRVSVSGDSEMSVERNSFVYKSPVTSVAVSNDGVVALGTGAGPIQLIYVGGSDQRLLKWHIDLVKTVAFSPDNKYLLSGGLEKVLVLWHLDSDNHQFLPRLNGTIDKIHIDVHKTDCYSMLLGCSDGIHHEMLTILAVDLVSRLTVNSARPRLVPGVAHSLRRAYKKLGNHDNLYQVPIRQDYSLPAAVHPTTNQVYFPSGASIQIYDWVRQEQQSLLNAAAVLPTGKVRSETKLVDPKISLVDFSNDGSWMVTVDTVTPSPVDNLLSKSDEYHALKFWKNVDSKNDGSKWELACKIIDPHGHGNKIFTIKPAPLLKNELAFVSADDKGGVRIWRVVKNLSNSNQQTAWTLHKSSPGGIASSSAVDVCWSQDSSVVFLAHETSVTVLDGYKLTTLNHISGIADSPIRAINVLENHLLVVSQTRIASYDLIRGAFSFIMRANFPEGARNLVAIDYDSRLICVAANYYEKSTNTLAIKSKLLVFNHNNLEPVFTKNHNQGITSVLCVSGSFLFVDLDARVGMLTSSLTEYLELNEDIKPDVNQIMIKAEERAQQEIAHNNDRKTFDMNTFASAFENAHSLTLDSLFDRVVSI

SEQ ID NO: 444 - protein, 517 aa, Meyerozyma guilliermondii
  source 1..517: note = SBI02945_Zinc finger C2H2-type
MKTGYYELLGVSETATDADLKRAYRKKALQLHPDKNPDDIEGATQRFALVRAAYEVLSDPQERSWYDSHKNQILRDDDDYGTEDEAIPSIPSISVEELMRYFNPALYTIIDDSLSGFYNVTERLFERLAAEEIRHARLQGLKEYELFKDDAPNVNVIDSSMLKFPRFGNSASDYTTQVRRFYTEWSSFQTVKSFAWKDSYRYSSAPDRRTKRLMEKENKKIRDSARKEYNETVRSYVQFIKKRDPRVKSGISEFEKQRKKKHQEELERQVKEQRNRELREMAKAKFDVQDWQKLDLDELEEVERILEEDFRSSSDSEFDEFAPPEDDDYYDCVVCNKQFKTKRQFEMHELSNKHKKAVKRLKWSMRKEGIELGIDKMDGETSQESDEFTTASEDEEKEDEKEDLKEAGDLKEFDSVDNNKPDYEVDNEVDSDIDTDLAKLAQSVENGLKVNFDSDDDWGTKPKKKKKEKKITTQTSSNSSLEVCTVCNESFPSRNKLFQHVNSTGHALAPPKRKKNK

SEQ ID NO: 445 - protein, 514 aa, Meyerozyma guilliermondii
  source 1..514: note = SBI02945_Zinc finger, RING/FYVE/PHD-type
MTLTSGAKYFIGYSALSVALLAWSIASSLEVSHNYFSFIVEITDGFKLGILINFIFFSFIITARALQLLLFGELRIIEIEHIVESVPMFTVNLLFNLVTNDHNLLNCVLLGFIVMSKLLHVILTDRLDFVHMKVVNTLAEERYTSSDVLRRYISSLYTWLIAFFIVADFVFAKFLVYDAFKGINSVTCLLFGFQFALLGVEALTFFSKLLLNIYELAVYNDANEDDDEFDVDADDTISEVDLGLRVWEKKGYYNKAIDIFSSSLKAVSYLAFIYLLTFHSGLSLPISMLQGTYSSIKKTYVEITLLFAFIESARRLDSQLATATTEDLSATDNLCIICREDMYSVEAYRETRGRPLPARKYPKKLDCGHILHMGCLKDWLERSENCPLCRRKVFAGNPTSNTDTNATNAQPEQPIPQHPIVHPEEVLDRRLEEYTELARQQNLAREQAASSSNRQEGQASGIQEAGDNSDQLQTIKLPDNAIIPPNWTILPIHRMSEMQYGVDFSTRHRGTLSI

SEQ ID NO: 446 - protein, 394 aa, Bacillus sp.; identical to SEQ ID NO: 429
  source 1..394: note = SBI03005_ Phosphoglycerate kinase

SEQ ID NO: 447 - protein, 132 aa, Bacillus sp.; identical to SEQ ID NO: 250
  source 1..132: note = SBI03005_30S ribosomal protein S8

SEQ ID NO: 448 - protein, 166 aa, Bacillus sp.
  source 1..166: note = SBI03005_50S ribosomal protein L10
MSNAIDTKKVVVDEITSKFKDSMSTVIVDYRGLSVSEVTELRKQLRDAGVEFKVYKNTLTRRAVEQVELTGLNDFLTGPNAIAFSNEDVIAPAKIINEFAKSHEALEIKAGVIEGNVATVEEVKALAELPSREGLLSMLLSVLQAPVRNLALATKAVADQKEEQGA

SEQ ID NO: 449 - protein, 95 aa, Bacillus sp.; identical to SEQ ID NO: 252
  source 1..95: note = SBI03005_50S ribosomal protein L23

SEQ ID NO: 450 - protein, 557 aa, Bacillus sp.
  source 1..557: note = SBI03005_Arginine--tRNA ligase
MNIAEQVKDALKEEIIAAVVKAGLADESQVPDVLLEVPKDKTHGDYSTNMAMQLARIAKKAPRQIAEDIVNAFDKGKASIEKLDIAGPGFINFYMNNQYLTKLIPAVLEAKEAYGETNTGGGQKVQVEFVSANPTGDLHLGHARGAAVGDSLCNILDKAGFDVSREYYINDAGNQINNLALSVEVRYFEALGLEKEMPEDGYRGEDIKGIGQKLADEFGDRFVHESEEERMKFFREYGLKYELEKLRVDLENFRVPFDVWYSETSLYENGKIEPALETLRAKGYVFEEDGATWLRSTDFGDDKDRVLIKKDGSFTYLLPDIAYHKDKLDRGFDQLINIWGADHHGYIPRMKAAIQALGYPEDKLEVEIIQLVHLYKNGEKMKMSKRTGKAVTMRDLIEEVGLDATRYFFAMRSAATHMDFDLDLAISTSNENPVYYAQYAHARICSMLRQGEEKGYEPNLEKADFSHIQSDKEYDLLKIIGSFPEVVAEAAEKRIPHRVTNYIYDLASALHSFYNAEKVIDVENGTKTTARLSLMKATQITLANALKLIGVSAPEKM

SEQ ID NO: 451 - protein, 185 aa, Bacillus sp.
  source 1..185: note = SBI03005_Protein GrpE
MSEEKQTPEQAAEVEAQEEAVQAETEEVKHDEQSAFQEKIDELQQLLDEKENKILRVQADFENYKRRARTEVETVQKYRSQHVVSDLLPALDNFERALGIDPDNEQTKSLLEGMQMVYRQLVEALKNEGVEPIEAVGKEFDPNLHQAVMQVEDESYDSNIVVEELQKGYKLKDRVIRPSMVKVNQ

SEQ ID NO: 452 - protein, 371 aa, Bacillus sp.; identical to SEQ ID NO: 414
  source 1..371: note = SBI03005_protein NusA

SEQ ID NO: 453 - protein, 244 aa, Candida duobushaemulonis
  source 1..244: note = SBI03199_Exoribonuclease, phosphorolytic domain 1
MSRMELYSPEGLRVDGRRWNELRRFECKINTHPNSSDGSSYVEQGNTKVMCVVQGPKEPPMRSQSDQNKATIEINLNVASFAGLERKVRSKNEKRMVELKTTLERTFDQSIISNLYPRTLIEINVQVLALDGGLLAVVTNAITLALIDAGVAMYDYVSAISVGLHDQTPLLDLNTLEENDMSCLTIGVVGKSEKLAMLLMEDKMPMDMLESVLGIAIAGGHRIRELMDEEVRGHGSARLTKLLS

SEQ ID NO: 454 - protein, 680 aa, Candida duobushaemulonis
  source 1..680: note = SBI03199_Heat shock protein 70 family
MSRHNNKLWVSGLSLFLVLLCVVMPFFSANSGVALAAAEDAEDNYGTVIGIDLGTTYSCVGVMKNGKVEILANDQGNRITPSYVAFTEEERLIGDAAKNQAPSNVNNTIFDIKRLIGLEYSDKTVQKEIKHLPYKIGKKGKMPVVEVEIGGEQKSFTPEEISGMILGKMKNIAEEYLGKKVTHAVVTVPAYFNDAQRQATKNAGTIAGLNVLRIVNEPTAAAIAYGLDKTDGEKQIIVYDLGGGTFDVSLLSIEGGVFEVLATAGDTHLGGEDFDFKLVRHLAKAFKKKHGMDITSNPKAIAKLKREAEKAKRTLSSQISTRVEIDSFVDGIDFSEPISRAKFEELNIDSFKKTLKPVERVLQDAGVKKSEVDDIVLVGGSTRIPKIQELIETYFDGKKASKGIHPDEAVAYGAAVQAGVLSGEEGVDDIVLLDVNPLTLGIETTGGVMTTLINRNTAIPTKKSQIFSTAADNQPTVLIQVYEGERALVKDNNLLGKFELTGIPPAPRGVPQIEVTFSLDANGILKVEALDKGTGKSKSITISNDKSRLSKEDIDRMVEEAEKFAAQDAEIKAKIESRNSLENLVHNMKQKLDDNDEYVAKMDEDDKEELTDAIAEITEFLEENYDTATSEEFDEQKQKLVKITSKISEKIYSAGGDAGEAGDAQFGDDDSDDEFDHDEL

SEQ ID NO: 455 - protein, 499 aa, Candida duobushaemulonis
  source 1..499: note = SBI03199_NADPH-sulfite reductase
MLRRQFLRSFASTALCNYKVAIVGSGPAGFYTAHHLLHKANGIDINVDFFDRLPTPYGLSRYGVAPDHPEVKNCEEYMDNLLAAHADRVRFFGNVNIGKNLTLLQLQAHYDSIVLAYGCTGSDNKLNVPGESLPGVISARQFVNWYNGHPDSENAPLNIPPPLDAIENVTIIGNGNVAIDVARVLLADPHLHWAPTDITTAAVELLAKSTVKRVNIVARRGLLESAFTNKEIRELLLLSKELKVRFVPLPDSILDSIRPNAKSLGRVDKRKFSMLDKASSESSAVKPDPDTKEWALKFLKSPKEFVVNPQRDDLLLATVFEENELHEDKLTQKVSVRPTGKTTSIKNELVITSIGYKGVEIDGFDSVGIAFDHKSNRLVNNGGRLLSQEAQQADPDHNFGYLKGWYTSGWIKHGPKGVIATTMMESFDTADKVLEDLSNGIHNVPTEDSDILGVLPENYVDWAGWKRINDFEVQEGQTLNKSRNKLQSAQRMVEVAHQK

SEQ ID NO: 456 - protein, 813 aa, Candida duobushaemulonis
  source 1..813: note = SBI03199_p-loop containing nucleoside triphosphate hydrolase protein
MADSAFSFDQSLLFASEIPDGASNTSHTLPLTDLAVSQDSTTQTPQDVGLDEPLIKHAATTANDPPEYIPGAKTATAFDGSTFTLRPRTKKTPVVTFSDADTILDMDALYERVGLRELIRKSRKTLEGLRKPAKVENRPQLWTDKYKPASFLELCSAGNERQFRQILNFLRKWNTVVRNEPVTDEDYVDHLGRPLKKVLLVHGASGSGKTLAVHLLARQMGYVVQELNAANSMDTMHGVDTHDGGGRFANATAALKLKVQNALTVNTLDLAKTDHESAVHNTVKPTCLVVDEIDSSINAGDIVRVITDLVLADGRSAPAAQAERKGQNTKAKKPFVLRRPIICIANDIYTHSVRTYGPNPMDKLRPICETVAFKRPVTSGSKNARINVSAQKSVKELLMKVSDSEKLGLDSKAISEIFEVCEGDIRACLNYMQFTSRKLDPDMHAFLASSSGKSARKDESMSWFAVVDQIFERDSRLSKDENFDIMFDMMFSGEGKSAASGSLDKIIRGCFNKYLDVVHLQDDSLVKPAEISDWLYYYDTLNSSARDSFFYPALVTLKFWSLFSEINVRKINDENSILPNARSMDFESMELAKQNKTILRKLSDQLPLDLRLSFCGSSSNSEFYACQFIPFLDTMLTPEIGSAKIRSSLKPHEKVNVEKLAHLVKQLDIKLETSRDTETNQTSLSFAPNWDTATVFETEFAHQLFAARAKALFARRLWLFPILQSELEHTAVSGLKRRAKSETPSDAEVGKQKKARISSSVDYFKNKYDLLSTQLESPTKLPTEHISRIWVKYHEGFSNAVRKNIGWSELWAP

SEQ ID NO: 457 - protein, 691 aa, Candida duobushaemulonis; identical to SEQ ID NO: 392
  source 1..691: note = SBI03199_PAN2-PAN3 deadenylation complex subunit PAN3

SEQ ID NO: 458 - protein, 972 aa, Candida duobushaemulonis
  source 1..972: note = SBI03199_Ribosomal protein S5 domain 2-type fold
MDSDDEYDEFGNYIGSGSDAEPETRENGSENAKFDGELLQDIETDVHMEDVPETHANSLAISNSLSQAFGDAETILVNPLAEGKDEPVIKTTEDHKLFVEYNLDDLPEVTYSREYMAQLCKDLPERIRNVAFVGNLHTGKTSLIDLIVQQTHTGISAAKKELQEFKPLRYLDTHKLEVERGLTIGAKFASLFVLDSRDRSYVLNVADCPGHPDFHDEIETSLNAVEGAVLVLDVLEGFTKRDKRVVSLLLKRNLPFTVVLNKFDRLILELRLRPPDFYHKVRYVLDDINAFVYHHEYAATYSHEKLVSPLNNNVVFALTTLLACFTLHTFAEVYERKFGANSRLSVAQLEKLLWGDFCYDTTTKHFRKYTGNEKGTTRTFEHLVLGPIYKLVTYSITSDPDGLVLSALLWDNFGVSLPKSSRKQDPQTLLRDVFGLVFDTTTDFAGLIVATIPDPRSELPSKLAARGINTNELPNDTLVAEVVKLVLDSDKKSHLAVVRVYLGTLVVGSEVRLVSGSNTQTESTANVTGLFVPGGRYKIPVKEVTAGNVALVSGISLAIEKTCTVFGAETPKSHLVPIHYTKCGHKSVYKVAVEPEHPRELPKLVEALRILSKAYVSAVVRVEESGEHVILAPGELYLDCFLHDVRFIADEYLLIKVSDPMTKFSETCSERSVTKITTYGVNKKTLVSITAEPVNDKKLSRAIEAGKISLARPQKTTAKVLRTEFGWDALAARSVWSFGPLDLNSPSMLLDDTLEGETDKNALVASKELMCAGFQLAVAEGPLCDEPIRNTKFKILDAVLSGSKLASASTHLIPITRNAVHTGFLTATPKLMEPTYRVNVVCTYKSQDAVHNILGRRRGWIVSETPVAATPLYEMEGYVPVIDSVGLDTDLRLYTQGQAFGTLEFARWDIVPGDPMDQDCALPAMKPVPRNSLARDFVMKTRRRKGLSGEPNLQKYLDPDLYMRLRDSGVIN

SEQ ID NO: 459 - protein, 232 aa, Candida duobushaemulonis; identical to SEQ ID NO: 394
  source 1..232: note = SBI03199_Ribosome assembly factor mrt4

SEQ ID NO: 460 - protein, 795 aa, Candida duobushaemulonis
  source 1..795: note = SBI03199_WD40-repeat-containing domain
MPDFLDKWAVTMVSGGKPVVFPGHLSFPAVASLDGKHSIVILAHQLRVYFLQTRQCIRTVDVDVSDAVAAALDPGNDNQLVVFTPLRVFYVNWKERLDNPVVATQPLEPALPGLVDVFHLTEHAYFAVTKDDETLTVVKIDRELATTSKLFKADQVTHHAVSKQGFKLAVALESQAVAIYDLTCLFSDILLPQTAVAATMEKHTLVNKPVTCMAVSDDGVVALGGQNGVILLVYSGFGSEKATKLLRWHIDPVRCLAFSHDQQYLVSGGNEKVLVFWHLDLDRTQYLPRLSGPLDRIFVDANRPDHYLVALRVDDPSSASPVHEILTILASDLVSRLSVSPIRPNFASSARLAEARIRKKLVKTPVNLGSVKNNVTAPVAVHPTTRHLYCATGPAIQAFDVVRGEQAFVQHAAPQISTGRVKSEHNVADPTVSEVAFTSGGTWMATFDSMPTLDFDNLMLKDDTSYALKFWKLSDNGWQLALKVVDPHGPGVSVGAVVAGVDESFTTVDVKGGVRVWRPKASVLTGQNGPNGTLNQKNTPATVWTLRWSSRPTAHSARVSGCYSADGSLLVVAHGFLLTAMDPHLLQPIAFKLPVSDLPIEKIAITGSHLIIASQSRLVSFDLVKGRETQLSARVSNVGVGNLVAVDTSRELVAVATNHFTTDSDVKLQGKLMVFKPSSLEPVYTSSYPLAIASVSVAAISPTPRTCRFSTMSRELALLTSVAVIRPYLPPLAVTLVAPLSLERQHSLNLAQCFLQKVLTLLQLNKLRALFEENGISSLIRLTALFDAVLDLISG

SEQ ID NO: 461 - protein, 580 aa, Candida duobushaemulonis
  source 1..580: note = SBI03199_Zinc finger C2H2-type
MKTCYYELLDVEATATDGELKKAYRKKALLLHPDKNPHDVEGANARFALVRAAYEVLSDPQERSWYDSHKSEILRDDSDYVADEPQEMVIPSISVQEILRYFNPTLYERVDDSLAGFYQVAGRLFERLAAEEVTHGKYQRLPKFDKYMDDSPNVSAIDESLFLYPRLGNSHTDYANGIRGFYNAWSSFQSVKSFNWMDEYRFSAAPDRRTRRLMEKENKKARDAGRKEYNETVRRFVGFIKKRDPRVKKGAEEFENSRRRQQQENLQRQAKQQKLQRMAEMNNHEVQDWQQMDMEELELVEEMLKQEFGSHSDETTDSEFDEFEDQLNEELFECVVCDKFFKSKSQFETHESSNKHKQNVEALREEMLREGIELGIDKDDIDLSEFETASSGNEDEESVDEVNEEVNEEDGELNEGKLPSEELEVPVAEDPTLFEVDNDIESDDSLWESSWKSKKQKKKSKKQQFKSEMEDGPETVDDDLAKLANGINLDDDDDWEVDTKKKKKPKKRGGAEKTSSPSPAPNQEAKTPPKAAGPKVTSSSEICAVCKEIFSSRNKLFQHVKKSGHAAPVKEVKKGKGKRR

SEQ ID NO: 462 - protein, 495 aa, Candida duobushaemulonis
  source 1..495: note = SBI03199_Zinc finger, RING/FYVE/PHD-type
MAGKGALWIAAYGAFSITAFGITLATLASKAFDYLTLMHELTDNFKLTILLNFVVCCFLLGGIFSIRVLFGELRIIEVEKIADQLPFYGLNLLFILFNDDNLLLNIVWAGVTVIAKVYHIIVLNRLDFVQLRVVNNLTRESYTPARIFRIFSLNLYVLLLAAFIFCDLVMAKILAYDVFQGVSSIGSLLFGIQFGVMGIEGFTYSGKLVLNVYELMFYRAQNHSRVNDDAELDDLDVLDDEENSEIIWENKAIYTQSFEIIASASKAAFYSVFIYILYVHSGMAPPIPIIQGSFFAVVSVAKQALQLRAYIKQSRILENLLASATHEELEAADYLCIICREDMHAPDLYEQRRGKALMPRRCPKKLQCGHILHLGCLKDWLERSDNCPLCRKKVFGHPSPASASATSSEAEPEQRPEMPTATSALGEPETITTHSHVPLFETTLANASIPVDWTALPISRSNTPGQFHIQLEPNQVGSLTKHGAGGRNNDAIENL

SEQ ID NO: 463 - protein, 394 aa, Bacillus endophyticus
  source 1..394: note = SBI03599_ Phosphoglycerate kinase
MNKKTVKDIDLKGKRVFCRVDFNVPMKDGKVTDETRIKAALPTINYLIEQGAKVILASHLGRPKGEVVEELRLTPVVERLQDLLGKPVAKADEAYGENVKQMISNMNEGDVLVLENVRFYAGEEKNDSELAKAFSELADVYVNDAFGAAHRAHASTAGIAEHIPAVAGFLMEKELEVLGKALSNPERPFTAIIGGAKVKDKIGVIDHLLDKVDNLIIGGGLSYTFIKALGHDVGKSLLEEDKIDLAKTFMDKAKEKGVNFYVPVDVVVADDFSNDANTQVVDIDSIPSDWEGLDAGPKTREIYVDVIKNSKLVIWNGPLGVFELDTFANGTKAVAEALAEATDTYSVIGGGDSAAAAEKFGLADKMSHISTGGGASLEFMEGKELPGVVALNDK

SEQ ID NO: 464 - protein, 132 aa, Bacillus endophyticus
  source 1..132: note = SBI03599_30S ribosomal protein S8
MVMTDPIADLLTRIRNANMVRHEKLEVPASNLKKQVAEILKREGFVRDVEYIEDNKQGIIRIFLKYGSNNERVITGLKRISKPGLRVYAKADEVPRVLNGLGIAIVSTSQGVLSDKEARQKQTGGEVLAYVW

SEQ ID NO: 465 - protein, 166 aa, Bacillus endophyticus
  source 1..166: note = SBI03599_50S ribosomal protein L10
MSSAIEQKKVIVDEIADKFKNSKSTIIVDYRGLNVSQVTELRKNLRDAGVEFKVFKNTLTRRAVEKAELTELNDALTGPNAIAFSNEDVIAPAKVLHAFAKENEALEIKAGVLEGNIASVEEIQAIATLPSREGLLSMLLSVLQAPARNFALATKAVADQKEEQGA

SEQ ID NO: 466 - protein, 95 aa, Bacillus endophyticus
  source 1..95: note = SBI03599_50S ribosomal protein L23
MKTSRDIIKRPVITERSTDVMADRKYTFEVDVRANKTAVKDAVEEIFDVKVEKVNIMNYKGKSKRVGRYTGLTNRRRKAVVTLTADSKEIELFEA

SEQ ID NO: 467 - protein, 556 aa, Bacillus endophyticus
  source 1..556: note = SBI03599_Arginine--tRNA ligase
MNIVEQVQENLKAEVKQAVLKAGLATEEQLPDVVLETPKDKTHGDYATNMAMQLARVARKAPRAIAEDIVANFDKTKASIEKLEIAGPGFINFYMNNSYLTDLIPVVLKAGTAYGETNVGEGEKVQVEFVSANPTGSLHLGHARGAAVGDSLCNILDKAGYEVSREYYINDAGNQINNLASSVEARYMQALGQEKEMPEDGYHGQDIIEIGKKLAEQEGDKYVNMEEQERLAFFREYGLKYEMEKLKIDLENFRVPFDVWYSETSLYQNGKIDDALETLKEQGHVYEEEGATWFRSTTFGDDKDRVLIKNDGSYTYLTPDIAYHQDKIKRGFNKLINVWGADHHGYIPRMKAAIQALGYDKDTLEVEIIQLVHLYKDGEKMKMSKRTGKAVTMRDLVEEVGLDATRYFFAMRSADTHMDFDLDLAVSQSNDNPVYYAQYAHARICSMLRQAEELNISFDKDVDFSLIKAEKEIDLLKKVGEFPQVVGEAALKRIPHRISNYIFDLASVLHSFYNAEKVLDKENIETTKARLALIQTVRITLQNALALIGVSAPEKM

SEQ ID NO: 468 - protein, 194 aa, Bacillus endophyticus
  source 1..194: note = SBI03599_Protein GrpE
MSNEKNVINEEVEAKDEVQEDIEAEANESQPVEGQEEGIEEQEAEESEVEELKRKLEEQENRYLRLQADFDNSRRRAKLDLEAERKYRAQSLAEDILPALDNFDRALSVETDDEQTQSILKGMTMVYNQLVEALKKEGVEAIEAVGQPFDPYQHQAIMQVSDDSFDSNVVVEELQKGYKLKDRIIRPAMVKVNE

SEQ ID NO: 469 - protein, 369 aa, Bacillus endophyticus
  source 1..369: note = SBI03599_protein NusA
MSIDLLDALEVLEKEKGISKNVIIEAIEAALISAYKRNFNQAQNVRVDLNLEKGTMRVFARKDVVDAVFDPRLEISLEEAKQVNPNFEIDDVVEMEVTPKDFGRIAAQTAKQVVTQRVREAERGVIYSEFIDREEDIMTGIVQRQDSRFIYVSLGKIEALLPVNEQMPNEQYHPHDRIKVYVTKVERTTKGPQIYVSRTHPGLLKRLFEKEVPEIYDGAVEIRSVAREAGDRSKISVHAEYDEIDPVGSCVGPKGQRVQAVVNELKGEKIDIVRWSEDPVEFVANALSPAKVLEVLVNEGDKATTVIVPDYQLSLAIGKRGQNARLAAKLTNWKIDIKSQSEAEAEGILVTKEEPSSPEAFDLDHSEME

SEQ ID NO: 470 - protein, 394 aa, Bacillus subtilis
  source 1..394: note = SBI03602_ Phosphoglycerate kinase
MNKKTLKDIDVKGKVVFCRVDFNVPMKDGEVTDDTRIRAALPTIKHLADQGAKVLLASHLGRPKGEVVEELRLTPVAARLGELLGKEVKKADEAYGDAVKAQISEMKDGDVLVLENVRFYPGEEKNDPELAKAFAELADVYVNDAFGAAHRAHASTAGIAEHLPAVAGFLMEKELDVLGKAVSNPDRPFTAIIGGAKVKDKIGVIESLLDKVDNLIIGGGLAYTFVKALGYEVGKSLLEEDKIELAKSFMDRAKEKGVNFYMPEDVLVADDFSNNANVKIVPISEIPSDLEAIDIGTKTRETYADVIKNSKLVVWNGPMGVFEIDLFAQGTKAVAEALAEAKDTYSVIGGGDSAAAVEKFGLADKMSHISTGGGASLEFMEGKELPGVAALNDK

SEQ ID NO: 471 - protein, 132 aa, Bacillus subtilis; identical to SEQ ID NO: 180
  source 1..132: note = SBI03602_30S ribosomal protein S8

SEQ ID NO: 472 - protein, 166 aa, Bacillus subtilis; identical to SEQ ID NO: 279
  source 1..166: note = SBI03602_50S ribosomal protein L10

SEQ ID NO: 473 - protein, 95 aa, Bacillus subtilis; identical to SEQ ID NO: 280
  source 1..95: note = SBI03602_50S ribosomal protein L23

SEQ ID NO: 474 - protein, 556 aa, Bacillus subtilis
  source 1..556: note = SBI03602_Arginine--tRNA ligase
MNIAEQMKDVLKEEIKAAVLKAGLAEESQIPNVVLETPKDKTHGDYSTNMAMQLARVAKKAPRQIAEEIVAHFDKGKASIEKLDIAGPGFINFYMNNQYLTKLIPSVLEAGEAYGETNIGNGERVQVEFVSANPTGDLHLGHARGAAVGDSLCNVLSKAGYDVSREYYINDAGNQINNLALSVEVRYFEALGLEKPMPEDGYRGEDIIAIGKRLAEEYGDRFVNEEESERLAFFREYGLKYELDKLRKDLENFRVPFDVWYSETSLYQNGKIDTALEALREKGHVYEEDGATWFRSTTFGDDKDRVLIKKDGTYTYLLPDIAYHKDKLDRGFDKLINVWGADHHGYIPRMKAAIEALGYEKGTLEVEIIQLVHLYKNGEKMKMSKRTGKAVTMRDLIEEVGLDAVRYFFAMRSADTHMDFDLDLAVSTSNENPVYYAQYAHARICSMLRQGEEQGLKPAADLDFSHIQSEKEYDLLKTIGGFPEAVAEAAEKRIPHRVTNYIYDLASALHSFYNAEKVIDPENEEKSRARLALMKATQITLNNALQLIGVSAPEKM

SEQ ID NO: 475 - protein, 187 aa, Bacillus subtilis; identical to SEQ ID NO: 324
  source 1..187: note = SBI03602_Protein GrpE

SEQ ID NO: 476 - protein, 371 aa, Bacillus subtilis; identical to SEQ ID NO: 283
  source 1..371: note = SBI03602_protein NusA

SEQ ID NO: 477 - protein, 394 aa, Bacillus sp.
  source 1..394: note = SBI04006_ Phosphoglycerate kinase
MNKKTLKDIDVKGKVVFCRVDFNVPMKDGEVTDDTRIRAALPTIKHLAEQGAKVLLASHLGRPKGEVVEELRLTPVAARLGELLGKEVKKADEAYGDAVKAQISEMKDGDVLVLENVRFYPGEEKNDPELAKAFAELADVYVNDAFGAAHRAHASTAGIAEHLPAVAGFLMEKELDVLGKAVSNPDRPFTAIIGGAKVKDKIGVIESLLDKVDNLIIGGGLAYTFVKALGYEVGKSLLEEDKIELAKSFMDRAKEKGVNFYMPEDVLVADDFSNDANVKIVPISEIPSDLEAIDIGTKTRETYADVIKNSKLVVWNGPMGVFDIDLFAQGTKAVAEALAEAKDTYSVIGGGDSAAAVEKFGLADKMSHISTGGGASLEFMEGKELPGVAALNDK

SEQ ID NO: 478 - protein, 132 aa, Bacillus sp.; identical to SEQ ID NO: 180
  source 1..132: note = SBI04006_30S ribosomal protein S8

SEQ ID NO: 479 - protein, 166 aa, Bacillus sp.
  source 1..166: note = SBI04006_50S ribosomal protein L10
MSSAIETKKVVVEEIASKLKESKSTIIVDYRGLNVSEVTELRKQLREANVEFKVYKNTMTRRAVEQAELNGLNDFLTGPNAIAFSTEDVVAPAKVLNDFAKNHEALEIKAGVIEGKVSTVEEVKALAELPSREGLLSMLLSVLQAPVRNFALAAKAVAEQKEEQGA

SEQ ID NO: 480 - protein, 95 aa, Bacillus sp.; identical to SEQ ID NO: 280
  source 1..95: note = SBI04006_50S ribosomal protein L23

SEQ ID NO: 481 - protein, 556 aa, Bacillus sp.
  source 1..556: note = SBI04006_Arginine--tRNA ligase
MNIAEQMKDVLKEEIKAAVLKAGLAEESQLPNVVLETPKDKTHGDYSTNMAMQLARVAKKAPRQIAEEIVAHFDKGKASIEKLDIAGPGFINFYMNNQYLTKLIPSVLEAGEAYGETNIGNGERVQVEFVSANPTGDLHLGHARGAAVGDSLCNVLSKAGYDVSREYYINDAGNQINNLALSVEVRYFEALGLEKPMPEDGYRGEDIIAIGKRLAEEYGDRFVNEEESERLAFFREYGLKYELDKLRKDLENFRVPFDVWYSETSLYQNGKIDKALEAIREKGHVYEEDGATWFRSTTFGDDKDRVLIKKDGTYTYLLPDIAYHKDKLDRGFDKLINVWGADHHGYIPRMKAAIEALGYEKGTLEVEIIQLVHLYKNGEKMKMSKRTGKAVTMRDLIEEVGLDAVRYFFAMRSADTHMDFDLDLAVSTSNENPVYYAQYAHARICSMLRQGEEQGLTPAADLDFSHIQSEKEYDLLKTIGGFPEAVAEAAEKRIPHRVTNYIYDLASALHSFYNAEKVIDPENEEKSRARLALMKATQITLNNALQLIGVSAPEKM

SEQ ID NO: 482 - protein, 187 aa, Bacillus sp.
  source 1..187: note = SBI04006_Protein GrpE
MSEEKQTVEQNETEEQEIIEEQAAADEQQEETNESELLQNQINELQGLLEEKENKLLRVQADFENYKRRSRLEMEASQKYRSQNIVTDLLPALDSFERALQVETDNEQTKSLLQGMEMVHRQLVEALKKEGVEAIEAVGQEFDPNLHQAVMQAEDENYGSNIVVEEMQKGYKLKDRVIRPSMVKVNQ

SEQ ID NO: 483 - protein, 371 aa, Bacillus sp.
  source 1..371: note = SBI04006_protein NusA
MSSELLDALTILEKEKGISKEIIIEAIEAALISAYKRNFNQAQNVRVDLNRETGSIRVFARKDVVDEVYDQRLEISIEEAQGIHPEYMVGDVVEIEVTPKDFGRIAAQTAKQVVTQRVREAERGVIYSEFIDREEDIMTGIVQRLDNKFIYVSLGKIEALLPVNEQMPNESYKPHDRIKVFITKVEKTTKGPQIYVSRTHPGLLKRLFEIEVPEIYDGTVELKSVAREAGDRSKISVRTDDPDVDPVGSCVGPKGQRVQAIVNELKGEKIDIVNWSSDPVEFVANALSPSKVLDVIVNEEEKATTVIVPDYQLSLAIGKRGQNARLAAKLTGWKIDIKSETDARELGIYPRELEEDDEPLFTEPETAESDE

SEQ ID NO: 484 - protein, 132 aa, Bacillus sp.
  source 1..132: note = SBI04011_30S ribosomal protein S8
MVMTDPIADLLTRIRNANMVRHEKIEVPASNIKKQIAEILKREGFVRDVEYIEDNKQGIIRIFLKYGSNNERVITGLKRISKPGLRVYAKTNEVPRVLNGLGIAIVSTSQGVLTDKEARQKQTGGEVLAYVW

SEQ ID NO: 485 - protein, 166 aa, Bacillus sp.; identical to SEQ ID NO: 314
  source 1..166: note = SBI04011_50S ribosomal protein L10

SEQ ID NO: 486 - protein, 95 aa, Bacillus sp.; identical to SEQ ID NO: 315
  source 1..95: note = SBI04011_50S ribosomal protein L23

SEQ ID NO: 487 - protein, 556 aa, Bacillus sp.
  source 1..556: note = SBI04011_Arginine--tRNA ligase
MNIVEQVQQKLKAEIQDAVVKAGLAEKAELPEVLLETPKDKTHGDYSTNMAMQLARIAKKAPRVIAEELVANFDKSKASIEKIDIAGPGFINFYMNNSYLTELIPTIVKAGEAYGQTNVGNGQKVQVEFVSANPTGDLHLGHARGAAVGDSLCNVLEKAGYDVSREYYINDAGNQINNLAYSVEARYMQALGLEKEMPADGYHGADIINIGKELAKEHGDKYANASEEERFEFFRQYGLDYELAKLKRDLEQFRVKFDVWYSETSLYKNDKISIALETLKKQGHVYEEEGATWFRSTTFGDDKDRVLIKNDGSFTYLTPDIAYHQDKIQRGFDKLINIWGADHHGYIPRMKAAIQALGYEKDTLEVEIIQMVQLYQNGEKMKMSKRTGKAVTMRDLVEEVGLDATRYFFAMRSADTHLDFDLDLAVSQSNENPVYYAQYAHARICSILRQGEEMGIQSTSGADLSLISAEKEMELLKKIGEFPQAVAEAATKRIPHRITNYVFDLASTFHSFYNAEKVLDSDNVETSKARIELVKAVQVTLQNSLKLIGVSAPEKM

SEQ ID NO: 488 - protein, 186 aa, Bacillus sp.
  source 1..186: note = SBI04011_Protein GrpE
MSNEKQVEEQNEEVVEEVQTDSAEATEAEVSEEVNPLQQENDQLKQQLEEEENRYLRLQADFDNFRRRSRLDAEAAQKYRAQSLVSDILPALDNFERALQVNTADEQTKSVLQGVEMVYRQLVEALQKEGVETIESVGKTFDPYEHQAVLQVEDDEYEPNTVVEELQKGYKLKDKIIRPAMVKVNQ

SEQ ID NO: 489 - protein, 370 aa, Bacillus sp.; identical to SEQ ID NO: 318
  source 1..370: note = SBI04011_protein NusA

SEQ ID NO: 490 - protein, 394 aa, Bacillus paralicheniformis
  source 1..394: note = SBI04173_ Phosphoglycerate kinase
MNKKSVKDIDVKGRVVFCRVDFNVPMKDGKVTDDTRIRAALPTIQYLTEQGAKVLLASHLGRPKGQVSEELRLTPVAARLGELIGKEVKKADEAYGDAVKAQISEMKDGDILVLENVRFYPGEEKNDPELSKAFADLADVYVNDAFGAAHRAHASTAGIAEHLPAVAGFLMEKELEVLGKALSNPERPFTAIIGGAKVKDKIGVIESLLEKVDNLIIGGGLAYTFVKALGHEVGKSLLEEDKIELAKSFMDRAKEKGVNFYMPTDVLVADDFSNDANTKVVPVSEIPSDWEALDIGEETRKTYADVIKNSKLVVWNGPMGVFELDVFAKGTKAVAEALAEAKDTYSVIGGGDSAAAVEKFGLADKMSHISTGGGASLEFMEGKELPGVKALNDK

SEQ ID NO: 491 - protein, 132 aa, Bacillus paralicheniformis; identical to SEQ ID NO: 423
  source 1..132: note = SBI04173_30S ribosomal protein S8

SEQ ID NO: 492 - protein, 166 aa, Bacillus paralicheniformis; identical to SEQ ID NO: 424
  source 1..166: note = SBI04173_50S ribosomal protein L10

SEQ ID NO: 493 - protein, 95 aa, Bacillus paralicheniformis; identical to SEQ ID NO: 425
  source 1..95: note = SBI04173_50S ribosomal protein L23

SEQ ID NO: 494 - protein, 556 aa, Bacillus paralicheniformis
  source 1..556: note = SBI04173_Arginine--tRNA ligase
MNIVEQMKDVLKQEIKEAVMKAGLAAESEIPEVVLEVPKDKSHGDYSTNMAMQLARIAKKAPRNIAEEIVASFDKGKASIDKLDIAGPGFINFYMNNQYLAKLIPAVLEAGEAYGETNIGGGERVQVEFVSANPTGNLHLGHARGAAVGDSLCNVLEKAGYEVSREYYINDAGNQINNLALSVEARYFQALGKDKPMPEDGYHGEDIKEIGRKLADEFGDRFVHEEESERLAFFREYGLKYELGKLREDLENFRVPFDVWYSETSLYQNGKIDQALEALREKGHIYEEDGATWFRSTAFGDDKDRVLIKKDGSYTYLLPDIAYHKDKLDRGFQKLINVWGADHHGYIPRMKAAIEALGYDKETLEVEIIQLVHLYKNGEKMKMSKRTGKAVTMRDLIDEVGLDAVRYFFAMRSADTHMDFDLDLAVSTSNENPVYYAQYAHARICSMLRQGEEKGISFEGNLDLTKIASEKEYDLLKVIGSFPEAVSDAAEKRIPHRITNYIFELASVLHSFYNAEKVLDPADEEKSRARLSLMKATQITLNNALKLIGVSAPEKM

SEQ ID NO: 495 - protein, 194 aa, Bacillus paralicheniformis; identical to SEQ ID NO: 427
  source 1..194: note = SBI04173_Protein GrpE

SEQ ID NO: 496 - protein, 372 aa, Bacillus paralicheniformis
  source 1..372: note = SBI04173_protein NusA
MSSELLDALTVLEKEKGISKDIIIEAIEAALISAYKRNFNQAQNVRVDLNRDTGSIRVFARKDVVDEVYDPRLEISIEDAVNINPNYIVGDVVEIEVTPKDFGRIAAQTAKQVVTQRVREAERGVIYSEFIDREEDIMTGIVQRIDNKFIYVSLGKIEALLPVSEQMPNEVYKPHDRIKVFITKVEKTTKGPQIYVSRTHPGLLKRLFEIEVPEIYDGTVELKSVAREAGDRSKISVRTDNPDIDPVGACVGPKGQRVQAIVNELKGEKIDIVHWSNDPVEFVANALSPSKVLDVIVNEEDKATTVVVPDYQLSLAIGKRGQNARLAAKLTSWKIDIKSETDARELGIYPRELEEEEPEELFFESETPESDE

SEQ ID NO: 497 - protein, 396 aa, Lactobacillus casei; identical to SEQ ID NO: 207
  source 1..396: note = SBI04256_ Phosphoglycerate kinase

SEQ ID NO: 498 - protein, 132 aa, Lactobacillus casei; identical to SEQ ID NO: 201
  source 1..132: note = SBI04256_30S ribosomal protein S8

SEQ ID NO: 499 - protein, 168 aa, Lactobacillus casei; identical to SEQ ID NO: 209
  source 1..168: note = SBI04256_50S ribosomal protein L10

SEQ ID NO: 500 - protein, 100 aa, Lactobacillus casei; identical to SEQ ID NO: 210
  source 1..100: note = SBI04256_50S ribosomal protein L23

SEQ ID NO: 501 - protein, 560 aa, Lactobacillus casei; identical to SEQ ID NO: 211
  source 1..560: note = SBI04256_Arginine--tRNA ligase

SEQ ID NO: 502 - protein, 196 aa, Lactobacillus casei; identical to SEQ ID NO: 212
  source 1..196: note = SBI04256_Protein GrpE

SEQ ID NO: 503 - protein, 417 aa, Lactobacillus casei
  source 1..417: note = SBI04256_protein NusA
MSKEMIQALDALEQEKGVKKEVVIEALEAALVSAYKRNYNQAQNVDVEFDPKQGDIHIYAVKEVTDEVFDSRLEVSLKEALAINKAYEIGDQIKFEVTPKDFGRIAAQTAKQVIMQRVREAERSIVYDEYSQYEDEILQGVVERRDNRFIYVNLGKIEAVLGRQDQMPNEKYEAHDRIKVYVTKVENTSKGPQVFVSRTHPGLVKRLFEQEVPEIFDGTVEIVNIAREAGDRTKIAVRSTNDAVDAVGTTVGPRGARVQAVVNELSGENMDVVQWEEDPADYIANALNPAQVIAVQFNDEANDRSATVIVPDYQLSLAIGKKGQNARLAAKLTGYKIDIKPESEVEFVDDDELPEAEAEAAAETNDNADAATDAETTPDSDAAAADDADDAKTVADAPDSADQAPVTPSATDHPAQA

SEQ ID NO: 504 - protein, 408 aa, Weissella cibaria
  source 1..408: note = SBI04259_ Phosphoglycerate kinase
MAKLTVEDLELKGKKVLMRVDFNVPLKEENGEVVVSNDNRIVAALPTIKYVLEQGGRAILFSHLGRIKSEDDKKGLSMKPVAQRLADLLGQPVTFVPATEGKELEDAVAALEDGQVLIFENTRFEDVVNGEEVKRESKNDPELGKYWASLGDVFVNDAFGTAHRAHASNAGIAANIAQTAAGFLMEKEIKFLGGAVENPERPFVAIIGGAKVSDKITIIENLLKKADKVIVGGGMAFTFDAANGKAIGNSLFEEDKVALAKQLIEEAGDKLVLPVDAVAADKFANDADTYIAEDGIKDGYMGLDAGPKSIELFKSVLADAKTVVWNGPMGVFEMPNFAKGTLAIGEELVKVTKENGATTIVGGGDSTAAVQQLGVADQLSHISTGGGASLEYLEGKTLPGIAAISEKD

SEQ ID NO: 505 - protein, 132 aa, Weissella cibaria
  source 1..132: note = SBI04259_30S ribosomal protein S8
MSMTDPIADFLTRIRNANMVRHDSVEVPASKIKKDIAEILKNEGFVRDVEYIEDDKQGVIRVFLKYGTDKTRVITGLKRISKPGLRSYVKADAVPKVLNGLGIAIISTSEGVITDKEARAKKIGGEVLAYVW

SEQ ID NO: 506 - protein, 168 aa, Weissella cibaria
  source 1..168: note = SBI04259_50S ribosomal protein L10
MSEATIALKAQQVSEVADKFKSAASAVVVDVRGLTVEQANNLRSELRSEGVELKVIKNKILTRAVEAADLTDLNDLFVGPSAVAFSNEDAIAPSRILKKFADNIEALEIKGGVVDGQVASVEDINKYAALPDRDGLLSMLLSTLQAPVRNFAYAVKAVSDAKEEAAEA

SEQ ID NO: 507 - protein, 95 aa, Weissella cibaria
  source 1..95: note = SBI04259_50S ribosomal protein L23
MDARDIILRPVITEQTMSVLDEKRYTFEVDVRATKPQIKRAIEEIFDVKIEKINTANVRGKLKRQGRFAGYTKKRKKATVKLTAASKDIQLFNEN

SEQ ID NO: 508 - protein, 561 aa, Weissella cibaria
  source 1..561: note = SBI04259_Arginine--tRNA ligase
MDYKNQVAQAVAAVVPELDEATILSKIEVPKDSTMGDFAFPTFLLAKERHMAPNQIAATVAEAIDATDFKAVQAAGPYVNFFLNQLTFGTDVLQTVLMNQDFGHNTDGEAGHVTIDMSSPNIAKPMSMGHLRSTVIGNSLAEISKANGYQPIKINHLGDWGTQFGKLMSAYKRWGSEDEVKADPINTLVKYYVRFHEEAKENPALDDEGRAWFKKLEDGDEEARQLWSWFREESLKEFMELYETLDIEFDSFNGEAFYNDKMDGVIDTLKEKGLLIESQGAQVVDLEKYNLNVAMIQRTDGATLYMTRDLAAAIFRKKNYNFVKSLYVVGGEQREHFMQLKAVLKEMGYEWSDDVEHIPFGLITVDGKKLSTRSGRIILLKDVLKDSVDLALQQINEKNPTLGNKELVAHEVGTGAVVFHDLMNERIGNFDFKLEEVVRFEGDTGPYVQYANARAQSILRKAGNPELDMSNLVIDDENVWETEKLLADFGDVVRRAWRDREPSVIAKYALNLSRTFNKYYANSKILAEDEQLNARLALVTAVSQVLTESLRLLGVKAPKEM

SEQ ID NO: 509 - protein, 180 aa, Weissella cibaria
  source 1..180: note = SBI04259_Protein GrpE
MAEDKQTPEEEVEETVETPDVDTETTEAVEIDPMVAMEAKVAEAEDKYLRAHAEMQNMQTRFAKEQAQAVKYASQKLAKSVLPALDNLERALQVEADDDAAKQIKTGVEMVYKTLASALEDNDIKAVGAEGEPFDPNFHQAIQSVPADDDHPADTIAQVLQKGYVLADRVIRPAMVAVYN

SEQ ID NO: 510 - protein, 379 aa, Weissella cibaria
  source 1..379: note = SBI04259_protein NusA
MSKELVNALDALEQEKGIKAEVLVEAIEEALKKAYEKNYDESENVEVQFDQKKGNIKVYSVKTVVEEIDEPYEQITLEEALELNKAYEIGDEIRFEVTPADFGRLAAQTAKQIIMQKVREAERGVVYDKFIGYENEVITGEVERQDSRFLYIILPGNQEAAMKQGDQMPNESYRMGDKIKVLVSQVQNEQKGPQVFVSRTHPELVKRLFEAEVPEVFDGTVEIKSIAREAGDRSKIAVYSHNSNLDAVGTMVGQRGTRVQAVVTELSGENMDIVEWTEDPAQFIKNALNPAEVVDVIFDPTNDRAVTVLVPDYQLSLAIGKRGQNARLAARLTGFKIDIKPESERDAVVADMANKENEAANAPVIEADVADDFEASEEA

SEQ ID NO: 511 - protein, 400 aa, Pediococcus ethanolidurans
  source 1..400: note = SBI04873_ Phosphoglycerate kinase
MAKLTVSDLDVKDKKVLMRVDFNVPVKDGVIGDDNRIVAALPTIKYIIEHDGKAILFSHLGRVKTEDDKKALTMRPVAQRLSDLLGKPVTFVPATRGKQLEDAIADMKDGDVLLFENTRFEDLDGKKESGNNAELGQYWASLGDEFVNDAFGTAHREHASNVGIATAMKAANKPVAAGFLMEKEIKFLGNAVDNPKHPFVAILGGAKVSDKIGVIDHLLDKADKVIIGGGMTYTFYAAKGLKIGNSLVEKDKIDLAKQILAKAGDKIVLPTDNVVAEKFDNDVPSKVVEGDIPDGYMALDIGPKSIKAFEDVLIDAKTVVWNGPMGVFEMSNYAKGTLEVGKFLGTLSDATTIVGGGDSTAAVKQLGVGDKLTHISTGGGASLEYLEGKTLPGIAAISDK

SEQ ID NO: 512 - protein, 132 aa, Pediococcus ethanolidurans
  source 1..132: note = SBI04873_30S ribosomal protein S8
MSMTDPIADFLTRIRNANMVRHESLEVPASTIKHDIAEILKNEGFIKDVEYVDDDKQGIIRVFLKYGKNKERVITGLKRISKPGLRSYVKADDVPKVLNGLGIAIISTSEGVITDKEARAKKIGGEVLAYVW

SEQ ID NO: 513 - protein, 168 aa, Pediococcus ethanolidurans
  source 1..168: note = SBI04873_50S ribosomal protein L10
MSKEAIAKKAAIVDTAVDYFSKAASAIVVDSRGLTVAEDTELRKELRDAGVTLHVIKNKILTRAAEKAGYKDLNDVFVGPSAVAFSDEDPVAPAKILKKFADEHDALTLKGGMIEGKVASIEEINTYASMPSREDLLSMLANVLQAPVRNVAYAVKAVADKKSEEDAA

SEQ ID NO: 514 - protein, 95 aa, Pediococcus ethanolidurans
  source 1..95: note = SBI04873_50S ribosomal protein L23
MESRDVILRPVVTEASMAEMDDKRYTFDVDTRATKTEVKKAVEDVFDVKVVKVNIMNVKGKLKRQGRYSGYTKKRRKAIVTLSSDSKEIKLFNEE

SEQ ID NO: 515 - protein, 562 aa, Pediococcus ethanolidurans
  source 1..562: note = SBI04873_Arginine--tRNA ligase
MDYKKQIAQSIVKALDGKLEEQSVYEKIEVPKTVNLGDYAFPTFILAKTLHKAPQMIAKDLVDQINQTNYEKVEAAGPYVNFFLDKSTFSDEVLQTVLTQNSHYGDATVGNNGKVPIDMSSPNIAKPISMGHLRSTVIGNSLANLLTKTGYRPVKINHLGDWGTQFGKLIEAYKLWGSEEEVKADPINKLLEYYVRFHKEDKDHPELDDEARKWFKKLEDGDDEAIQLWQWFRSVSLQSFKRIYDKLGITFDSYKGEAFYNDKMDEVVQILEDKKLLKESQGAEIVDLDKYNLNPALIKKTDGATLYITRDLAAAIYRKRTYDFVQSLYVVGAEQINHFKQLKAVLKEMGFDWSDDIHHIPFGLITLNGKKLSTRSGRVVLLDKVLDDAIDLAKQQIQSKNPDLKNADQVAHEVGVGAVIFHDLKNERMNSFDFDLNEVVRFEGETGPYVQYTRARAESILRKADHKVAVADLKLSDPNVWETLKFLQAFPETVLRAVREYEPSIIAKYALHLAKSFNQYYANSKVLVKDDQLNSRLALVQSVSIVLEIALNLLGVQAPSEM

SEQ ID NO: 516 - protein, 198 aa, Pediococcus ethanolidurans
  source 1..198: note = SBI04873_Protein GrpE
MSEDKKAKAVDQTTEMQPKKAKDKHATTAKVEKKLKKHLKSSAEVETLKAQVTDLNGKVDAITDQYIRAKAEIANIQKRNEKEQANLVKYDGQNLAKDILPVIDNLERALAIEVTDENGKQLKKGIQMVFDHMSKALKDNHVTEIEAVGKPFDPHIHQAVQTVAVKDGEKADQVVSVLQKGYMLKDRVLRPAMVAVSQ

SEQ ID NO: 517 - protein, 367 aa, Pediococcus ethanolidurans
  source 1..367: note = SBI04873_protein NusA
MSKEMINALNTLEEEKGIKKEVVIDALEAALVSAYKRNYGQAQNVDVEFDDKKGDIHVYAVKEVVEEVLDDQQQVSLSDALNINKAYELGDHIKFEVTPKSFGRIAAQTAKQVILQRVREAEREIIYNKYSEYENEIMTGEVARRDNRFVYVDLGGVEAVMSKQDQIPTERYEPHDHIKVYVTKVENSGKGAQVFVSRSTPDLLKRLFEQEVPEIFDGTVEIVSVAREAGDRAKVAVRSNDPDIDAVGTCVGPRGQRVQTIVNELNGENMDIVEWEDDPAKYISNALNPAEVVDVLFDEENERTCMVIVPDYQLSLAIGKRGQNARLAAKLTGYKIDIKSETDAKDLVEQPNEEDTTDSDSETDDNE

SEQ ID NO: 518 - protein, 404 aa, Lactobacillus buchneri
  source 1..404: note = SBI04874_ Phosphoglycerate kinase
MAKLTVSDLNLEGKKVLMRVDFNVPIKDGVIGDDNRIQAALPTIKYVLDHKGKAILCSHLGRIKKEDDKKGLSLRPVAERLSNLLNKPVIFVPVTEGKQLEDAINKMEDGSVLLFENTRYEDVVNGEYVKRESGNDPKLGEYWASLADEFINDAFGTAHRSHASNAGIAEAMHKDGKPVAAGFLMEKEIQFLGEAVNNPKRPFVAILGGAKVSDKIGVIDNLLDKADKIIIGGGMTYTFYAAKGIKIGDSLIEKDKIDVAKKILEKGGDKIVLPTDNVVAKEFKNDAEHKVVAGDIDDGWMALDIGPKSIEDFENVLKDAKTVVWNGPMGVFEMPNYAQGTLRIGKFLGTLNDATTIVGGGDSTAAVKQLGVADKLTHISTGGGASLQYLEGKTLPGIAAIDNK

SEQ ID NO: 519 - protein, 132 aa, Lactobacillus buchneri
  source 1..132: note = SBI04874_30S ribosomal protein S8
MSMTDPIADFLTRIRNANMVYHETVEVPASKIKRDIAEILKREGFVRDVEYIEDDKQGIIRVFLKYGKDKQRVITGLKRISKPGLRSYVKADAVPKVLNGLGIAIISTSNGVITDKQARAQKIGGEVLAYVW

SEQ ID NO: 520 - protein, 170 aa, Lactobacillus buchneri
  source 1..170: note = SBI04874_50S ribosomal protein L10
MSEQTVAIKAKKVASVTEELKNASSVVIINYRGLTVAEVTDLRQQLRDEGVKMEVIKNKVMDRAAAEAGFDDLKPTFNGPTAVVFSSEDPVAGPKIVHNFAKTNDKLKLKGGVIDGEVASLEEITAYAALPSREELLSTLANILQAPVRNFAYGVKAIADKKQSDDGDAA

SEQ ID NO: 521 - protein, 95 aa, Lactobacillus buchneri
  source 1..95: note = SBI04874_50S ribosomal protein L23
MESRDIILRPVITEETTSKMDDKTYTFDVDLRATKTQVKKAIEDIFDVKVVRVNIMNVRGKLKRQGRYAGYTKKRRKAIVTLTEDSKEIELFNEE

SEQ ID NO: 522 - protein, 563 aa, Lactobacillus buchneri
  source 1..563: note = SBI04874_Arginine--tRNA ligase
MDYKAQVTNSILSVLNDELSSAEVYEKLEKPKTLAMGDLAFPAFSLAKVFHKAPNAIAQELVEKIDQSSYEKVEAKGAYLNFFLDKGNFSNEILNEVLEEGSAYGQNDSGKGGNVPIDMSSPNIAKPISMGHLRSTVIGNSIAKLLVKNGYHPIKDNHLGDWGTQFGKLIVAYKKWGNEEDVKKDPINNLVKYYVKFHNEDKEHPELDDEARETFKKLEDGNEEEVFLWKWFRKVSLESFNKIYEKLGVTFDTYNGEAFYNDKMDEGIQILKDKGLLVESQGAQVVKLDKYNLNPALILKSDGATLYITRDIATAIYRDRTYKPAMNLYVVGAEQTYYFQQLKAVLLEMGLPSAENLHHIPFGLITVNGKKLSTRSGRIILLDEVLDDAIDLAKKQIEAKNPDLPNKDEVAKEVGVGAIIFGDLKNERTNNIDFVLEDQLRFEGETGPYVQYSHARAESILRKAGDIDLHGANKQLDDPAAWETVTALKDFPDVVKSACKDFEPSEIAKYALRLAKSFNKYYAHSKILVEDDQLAARLSLVKAVSIVLKESLNLLGVKAPDAM

SEQ ID NO: 523 - protein, 202 aa, Lactobacillus buchneri
  source 1..202: note = SBI04874_Protein GrpE
MAENKDDSVKKNPSGPTQDQSTQPAKAAKKAAKPEKKADQAKSPDANDIKKLKQTVVDLQKKLDAMEDKFLRAEADMRNIETHAKKEQADLIKYDGQQLAHDILPIVDNLQRALKVDVTDESGKQLKQGVSMVYEHFTKALSDNGVEVIDALNKPFDPKFDQAVQTAPADDDHPADTVVQVLQDGYRLKDRVLRPAMVVVAK

SEQ ID NO: 524 - protein, 398 aa, Lactobacillus buchneri
  source 1..398: note = SBI04874_protein NusA
MSKELLGALSALEEEKGIKKEVVIEALEAALVSAYKRNYGQAQNVEVSFDDKKGEMHVYAVKTVVDDVVDDQLQVSLDEALEINKGYELGDEIKFEVTPKNFGRIAAQTAKQVIMQRVREAERENVFDEYSKYEDELVTGTVERQDTRFVYVNLGKVEAVMGSKDQMPNEVYRPQDRIKVYVTKVENATKGPQVFVSRTATGMLKRLFEQEVPEIYDGTVEIVSIAREAGDRAKVAVRSNNSDIDPVGTAVGPRGQRVQTIVNELHGENMDIVEWDEDDASYIANSLNPAEVIDVIFDDDNERACTVIVPDYQLSLAIGKKGQNARLAAKLTGFKIDIKSETEAKEILADKAAAASDDTEADEASDQGDQTEDSTEDAPTDGADVNTNPDESNEDTQD

SEQ ID NO: 525 - protein, 394 aa, Bacillus amyloliquefaciens; identical to SEQ ID NO: 371
  source 1..394: note = SBI04877_ Phosphoglycerate kinase

SEQ ID NO: 526 - protein, 132 aa, Bacillus amyloliquefaciens; identical to SEQ ID NO: 372
  source 1..132: note = SBI04877_30S ribosomal protein S8

SEQ ID NO: 527 - protein, 166 aa, Bacillus amyloliquefaciens; identical to SEQ ID NO: 373
  source 1..166: note = SBI04877_50S ribosomal protein L10

SEQ ID NO: 528 - protein, 95 aa, Bacillus amyloliquefaciens; identical to SEQ ID NO: 280
  source 1..95: note = SBI04877_50S ribosomal protein L23

SEQ ID NO: 529 - protein, 556 aa, Bacillus amyloliquefaciens; identical to SEQ ID NO: 375
  source 1..556: note = SBI04877_Arginine--tRNA ligase

SEQ ID NO: 530 - protein, 191 aa, Bacillus amyloliquefaciens; identical to SEQ ID NO: 376
  source 1..191: note = SBI04877_Protein GrpE

SEQ ID NO: 531 - protein, 373 aa, Bacillus amyloliquefaciens; identical to SEQ ID NO: 350
  source 1..373: note = SBI04877_protein NusA

SEQ ID NO: 532 - protein, 400 aa, Pediococcus pentosaceus
  source 1..400: note = SBI04880_ Phosphoglycerate kinase
MAKLTVSDLDVKNKKVLMRVDFNVPVKNGVIGDDNRVVAALPTIKYIIENGGKAILFSHLGRIKTEEDKKELTLRPVAQRLSDLLGKPVTFVPVTRGAQLEDAVNGMNDGDVLLFENTRFEDLDGKKESKNDPELGKYWASLGDMFVNDAFGTAHRAHASNVGVAEAMKADGKQVAAGFLMEKEIKFLGEAVDEPKHPFVAILGGAKVSDKIGVIDHLLNKADKVIIGGGMTYTFYAAKGMSIGNSLVEADKIDVAKEILAKGGDKIVLPSDSIVAEKFDNDVPNKVVEGDIPDGYMALDIGPKSVAEFKDVLKDAKTVVWNGPMGVFEMSNYANGTLEVGKFLGTLSDATTIVGGGDSTAAVKQLGVGDQLTHISTGGGASLEYLEGKELPGIAAISNK

SEQ ID NO: 533 - protein, 132 aa, Pediococcus pentosaceus
  source 1..132: note = SBI04880_30S ribosomal protein S8
MSMTDPIADFLTRIRNANMVRHESLEVPASKIKKDMAEILKNEGFIKDVEYIEDDKQGIIRVFLKYGKNNERVISGLKRISKPGLRSYVKSDEVPKVLNGLGIAIISTSEGVITDKEARAKKIGGEVLAYIW

SEQ ID NO: 534 - protein, 168 aa, Pediococcus pentosaceus
  source 1..168: note = SBI04880_50S ribosomal protein L10
MSKEAIAQKAAIVDEVAEQLKESVSAIVVDSRGLTVAEVTDLRKQLRDAGIKLRVIKNKVLTRAAEKAGFEGMDDVFVGPSAVAFSEEDAVAPAKILKTFADSNDNLSIKGGIIEGEVADIDTINTFATLPSREDLLAMLANEFMSPVRDVAYALKAVADKKSEEDAA

SEQ ID NO: 535 - protein, 95 aa, Pediococcus pentosaceus
  source 1..95: note = SBI04880_50S ribosomal protein L23
MESRDIILRPVVTEASMALIDDKRYTFDVDPRATKTQVKKAIEEIFEVTVIKINIMNVKGKLKRQGRYAGYTKKRRKAIVQLSADSKEIQLFGEE

SEQ ID NO: 536 - protein, 562 aa, Pediococcus pentosaceus
  source 1..562: note = SBI04880_Arginine--tRNA ligase
MDYKKKVAAALAPALNEYLTDTEIYEKIEIPKESKMGDYAFPTFTLAKVLRKAPQMIASELVEKIDQDQFEKVEVAGPYINFFLDKTAFGAEVLGTVLSQKAKYGQNDDGNQGNVPIDMSSPNIAKPISMGHLRSTVIGNSLSLIMSKNGYNPIKINHLGDWGTQFGKLITAYKLWGSEEEVKADPINKLLEYYVRFHKEDQEKPELDDIARDWFKKLEDGDEEAMNLWQWFREESLKSFKQIYDKLGITFDSYKGEAFYNDKMDEIVQILEDKGLLKESQGAQVVDLEKYNLNPALIKKTDGATLYITRDLAAALYRYRTYDFNQSLYVVGAEQTNHFKQLKAVLKEMGFDWSDDVHHIPFGLITLNGKKLSTRSGRVVLLDEVLNDAVSLAKKQINDKNPDLANADTVAKEVGVGAVIFHDLKNERTNSFDFNLEDVVRFEGETGPYVQYSRARAESILRKAGDVEEFAQLNITDPKAWDTLKALQDFPNIVKRAAAQYEPSVIAKYALGLAKAFNKYYANSKILADDEEKTARLALVKSVSIVLEESLRLLGVKAPDEM

SEQ ID NO: 537 - protein, 190 aa, Pediococcus pentosaceus
  source 1..190: note = SBI04880_Protein GrpE
MAKEKKEEVKEEEVSEATSTEGSADVESTNNDDSTTETQATTALDDIKKVEAERDELSDKYIRAQAEIVNMRRRNEKEQASLIKYDGQKLAKAILPALDNLERALAVESASEQLQKGVEMVQTDLLKALKENHVAEIEAEGQAFDPNMHQAVQTVPADDDHPADTVVQVLQKGYILKDRVLRPAMVIVAQ

SEQ ID NO: 538 - protein, 362 aa, Pediococcus pentosaceus
  source 1..362: note = SBI04880_protein NusA
MSKEMITALDILEKEKGIKKEVIVEALEAALVSAFKRNYGQAQNVEVEFNDRKGDIHVYAVKKVVEEVEDDQLEVSLADALMINRAYELDDEIRFEVTPKNFGRIAAQTAKQVIMQRVREAERGVIYEKYGQYEDEIVTGEVSHRDNRYVYVDLGGVEAVMAKSDQIPGEQYESHDHIKVYITKVENNGKGPQIFASRTDSGLLKRLFEQEVPEVYDGTVEIMSIAREAGDRAKIAVRSNDPDIDAVGTCVGAKGQRVQTIVNELHGENMDIIEWKEDPAEYIANALKPSEVIDVLFNEEDENYCMVIVPDYQLSLAIGRRGQNARLAAKLVNFKIDIKSETDASEYAEEEDSEESTEETAE

SEQ ID NO: 539 - protein, 404 aa, Lactobacillus buchneri; identical to SEQ ID NO: 518
  source 1..404: note = SBI04881_ Phosphoglycerate kinase

SEQ ID NO: 540 - protein, 132 aa, Lactobacillus buchneri; identical to SEQ ID NO: 519
  source 1..132: note = SBI04881_30S ribosomal protein S8

SEQ ID NO: 541 - protein, 170 aa, Lactobacillus buchneri
  source 1..170: note = SBI04881_50S ribosomal protein L10
MSEQTVAIKAKKVASVTEELKNASSVVIINYRGLTVAEVTDLRQQLRNEGVKMEVIKNKVMDRAAAEAGFDDLKPTFNGPTAVVFSSEDPVAGPKIVHNFAKTNDKLKLKGGVIDGEVASLEEITAYAALPSREELLSTLANILQAPVRNFAYGVKAIADKKQSDDGDAA

SEQ ID NO: 542 - protein, 95 aa, Lactobacillus buchneri; identical to SEQ ID NO: 521
  source 1..95: note = SBI04881_50S ribosomal protein L23

SEQ ID NO: 543 - protein, 563 aa, Lactobacillus buchneri
  source 1..563: note = SBI04881_Arginine--tRNA ligase
MDYKAQVTNSILSVLNDELSSAEVYEKLEKPKTLAMGDLAFPAFSLAKVFHKAPNAIAQELVEKIDQSSYEKVEAKGAYLNFFLDKGNFSNEILNEVLEEGSAYGQNDSGKGGNVPIDMSSPNIAKPISMGHLRSTVIGNSIAKLLVKNGYHPIKDNHLGDWGTQFGKLIVAYKKWGNEEDVKKDPINNLVKYYVKFHKEDKEHPELDDEARETFKKLEDGNEEEVFLWKWFRKVSLESFNKIYEKLGVTFDTYNGEAFYNDKMDEGIQILKDKGLLVESQGAQVVKLDKYNLNPALILKSDGATLYITRDIATAIYRDRTYKPAMNLYVVGAEQTYYFQQLKAVLLEMGLPSAENLHHIPFGLITVNGKKLSTRSGRIILLDEVLDDAIDLAKKQIEAKNPDLPNKDEVAKEVGVGAIIFGDLKNERTNNIDFVLEDQLRFEGETGPYVQYSHARAESILRKAGDIDLHGANKQLDDPAAWETVTALKDFPDVVKSACKDFEPSEIAKYALRLAKSFNKYYAHSKILVEDDQLAARLSLVKAVSIVLKESLNLLGVKAPDAM

SEQ ID NO: 544 - protein, 202 aa, Lactobacillus buchneri; identical to SEQ ID NO: 523
  source 1..202: note = SBI04881_Protein GrpE

SEQ ID NO: 545 - protein, 398 aa, Lactobacillus buchneri; identical to SEQ ID NO: 524
  source 1..398: note = SBI04881_protein NusA

SEQ ID NO: 546 - protein, 396 aa, Enterococcus gilvus
  source 1..396: note = SBI04884_ Phosphoglycerate kinase
MAKMTVKDLDLKDKKVLVRVDFNVPVKDGVITDDTRIKAALPTINYILEQGGKAILFSHLGRVKTEEDKAGKSLKPVAERLSELLGKNVTFVPETRGSDLETAIADMKDGDVVVFENTRFEDIDGKKESGNDAELGKYWASLGDVFVNDAFGTAHRAHASNVGIASTGIPTVAGFLMEKEIKFIGEAVEEPKRPMVAILGGAKVSDKIGVIKNLIPKADKILIGGGMTYTFYKAKGMEIGNSLVEADKVDLAKELIEAAGDKLVLPVDSITAAEFSNDVPTEEHTGDVPVGQMGLDIGPESIALFAQTLEGAKTVVWNGPMGVFEMSNFARGTIGVCEAIANLKDATTIIGGGDSAAAAEQLGFADKFTHISTGGGASLELLEGKELPGLAAINDK

SEQ ID NO: 547 - protein, 132 aa, Enterococcus gilvus
  source 1..132: note = SBI04884_30S ribosomal protein S8
MVMTDPIADFLTRIRNANMVKHDSVEVPASKIKRDIAEILKREGFVRDVEYIEDDKQGMIRVFLKYGKNDERVITNLKRISKPGLRAYVKADEVPKVLNGLGIAIISTSEGLVTDKEARGKNVGGEVLAYVW

SEQ ID NO: 548 - protein, 166 aa, Enterococcus gilvus
  source 1..166: note = SBI04884_50S ribosomal protein L10
MSEVAIAKKAAIVDEVTEKFSAAASAVIVDYRGLTVEQVTELRKQLRDANVEMKVIKNSILVRAAEKAGLNGLEEVFSGPTAVAFSNEDVVAPAKIIDEFAKTAEKLEIKGGIIEGKVASIEEITALAKLPNRDGLLSMLLSVLQAPVRNVAYAVKAVAEKEEEVA

SEQ ID NO: 549 - protein, 96 aa, Enterococcus gilvus
  source 1..96: note = SBI04884_50S ribosomal protein L23
MNLLDVIKRPVITEKSMLDMDEKKYTFEVDTRANKTLVKQAVEAAFEVKVKNVNIMNAKPKAKRMGKYQGFTKKRRKAVVTLTEDSKEIQLFDAAE

SEQ ID NO: 550 - protein, 563 aa, Enterococcus gilvus
  source 1..563: note = SBI04884_Arginine--tRNA ligase
MNNKEIVAQAVFEVVKENLTLPEVERLLENPKSVDHGDVAFPTFALAKVFRKAPQQIAAELAEQINPDAFEKIEVVGPYLNFFMKKEVISSMVLKQIAKEAHHFGDSNIGNEGNVTIDMSSPNIAKPISMGHLRSTVIGNSISLILGKIGYNPIKINHLGDWGTQFGKLIVAYKKWGSEEKVKAEPINELLRLYVEFHEKAEEEPELNDEARAWFKKLEENDEEALDLWTWFRSESLKEFNKIYGMLEVDFDSYNGEAFYNDKMDEVVTMLEEKHLLQTNEGAEIVDLEKYDLNPALIKKSDGATLYITRDLAAALYRKREYNFVKSLYVVGNEQSGHFKQLKAVLKEMDFDWSDEMIHVPFGLITKDGKKLSTRKGKIVLLEEVLNEANSLALNQIQEKNPDLPNKEEVAHQVGVGAVIFHDLKNDRLNNFDFSLEEVVRFEGETGPYVQYTHARAMTVLEKGNFAIDTEAVYALNDKDSWEIIKLLQSYPEVVMQAADQYEPSVIAKHSIRLAQAFNKYYAHTKILVEDDQKEARLALVHAVTVILKEDLRLLGVHAPNKM

SEQ ID NO: 551 - protein, 178 aa, Enterococcus gilvus
  source 1..178: note = SBI04884_Protein GrpE
MAKEKKHEVEEEVEAEETMETEEIDIPEVSEVEDLTNKFSEMEDKFLRARAEIANMSNRNKNEREQLIRYRSQDLGKKLLPAIDNLERALATEVTDDQSASLKKGVEMVLESLTVALKEEGITEIKAEGETFDPNLHQAVQTVPAEDDVAPETIVNVLQKGYQLHDRVLRPAMVVVAQ

SEQ ID NO: 552 - protein, 405 aa, Enterococcus gilvus
  source 1..405: note = SBI04884_protein NusA
MSKEMLNALDTLEAEKGVSKEIVIDALEAALVSAYKRHYGQSQNVEVEFNEKKGDIHVYAVKEVTEEVMDSQLEVSLKDAMEINPAYEIGDTIRFEVTPKDFGRIAAQTAKQVILQRVREAERSIIYNEYSAYEKDIMQGVVERQDNRYIYVNLGKIEAVLSKQDQMPNEHYKPHDRIKVYVSRVENTSKGPQVFVSRSHPDLLRRLFEQEIPEVYDGIVEIVSIAREAGDRAKVAVRSTDPNIDPVGTCVGPKGQRVQAIVNELKGENMDIVEWNEDPAVFIANSLNPAQVEDVIFDIDNPKVCTVVVPDYQLSLAIGKRGQNARLAAKLTAHKIDIKSESDMEEFYANYDETEVEEIVTEVEEITSEVEAIETEVEDIESEAEVTVDEMIEDEENIPSDQTDQ

SEQ ID NO: 553 - protein, 396 aa, Lactobacillus casei; identical to SEQ ID NO: 207
  source 1..396: note = SBI04887_ Phosphoglycerate kinase

SEQ ID NO: 554 - protein, 132 aa, Lactobacillus casei; identical to SEQ ID NO: 201
  source 1..132: note = SBI04887_30S ribosomal protein S8

SEQ ID NO: 555 - protein, 168 aa, Lactobacillus casei; identical to SEQ ID NO: 209
  source 1..168: note = SBI04887_50S ribosomal protein L10

SEQ ID NO: 556 - protein, 100 aa, Lactobacillus casei; identical to SEQ ID NO: 210
  source 1..100: note = SBI04887_50S ribosomal protein L23

SEQ ID NO: 557 - protein, 560 aa, Lactobacillus casei; identical to SEQ ID NO: 211
  source 1..560: note = SBI04887_Arginine--tRNA ligase

SEQ ID NO: 558 - protein, 196 aa, Lactobacillus casei; identical to SEQ ID NO: 212
  source 1..196: note = SBI04887_Protein GrpE

SEQ ID NO: 559 - protein, 417 aa, Lactobacillus casei; identical to SEQ ID NO: 213
  source 1..417: note = SBI04887_protein NusA

SEQ ID NO: 560 - protein, 400 aa, Lactobacillus plantarum; identical to SEQ ID NO: 186
  source 1..400: note = SBI04889_ Phosphoglycerate kinase

SEQ ID NO: 561 - protein, 131 aa, Lactobacillus plantarum; identical to SEQ ID NO: 187
  source 1..131: note = SBI04889_30S ribosomal protein S8

SEQ ID NO: 562 - protein, 167 aa, Lactobacillus plantarum; identical to SEQ ID NO: 188
  source 1..167: note = SBI04889_50S ribosomal protein L10

SEQ ID NO: 563 - protein, 97 aa, Lactobacillus plantarum; identical to SEQ ID NO: 189
  source 1..97: note = SBI04889_50S ribosomal protein L23

SEQ ID NO: 564 - protein, 562 aa, Lactobacillus plantarum
  source 1..562: note = SBI04889_Arginine--tRNA ligase
MDYKQLVAAALAPALPDLTQEAILDKIEQPKTSKQGDLAFPTFTLAKTLHKAPQMIASDIVEKVDGSDFEKVVAMGPYVNFFFKKDAFAADILNQVLSNGGHFGDAKLGEAGQVPIDMSSPNIAKPISMGHLRSTVIGNSLANILSKLDYQPVKINHLGDWGTQFGKLITAYKMWGSEAEVKADPINNLLKYYVRFHKEDVDHPEMDDEAREWFKKLENGDEEATHLWSWFRSESLKAFKKIYQRLDIDFDSFKGEAFYNDKMQEVVDILEDKHLLQESQGAEVVDLSKYDLNPALIKKSDGATLYITRDLAAAIYRKRTYDFVQSLYVVGNEQTNHFKQLKAVLTEMGFDWADQIHHIPFGLITSGGKKLSTRSGRVILLDKVLDDAVALAHEQIEAKNPDLPNKDEVADAVGIGAVVFHDLKNERMNSFDFNLEEVVRFEGETGPYVQYAHARAESILRKAGSPEIAATEQTLSDPAAWDTLKLLSEFPATVVRASTEYEPSVIAKYAIHLAKAYNKYYANTKILVEDDELNARLALVKSVSIVLKEALRLLGVKAPDEM

SEQ ID NO: 565 - protein, 202 aa, Lactobacillus plantarum
  source 1..202: note = SBI04889_Protein GrpE
MKTLAKKSTRTTPEDSQASTTDSAAMSTASEATQAATSATDDQAEQTTAVDPTQQITDLKAQLDAKDDQLLRAQAEIVNMQNRNKKEQAALLKYDGQALAKDVLPVLDNLERALATPADDEAAQQLKKGVEMVYGHLQDALKKHGVTEIAAAGEKFDPNIHQAVQTVPVDDDHPADTVVQVLQRGYLLKDRTLRPAMVVVAQ

SEQ ID NO: 566 - protein, 405 aa, Lactobacillus plantarum
  source 1..405: note = SBI04889_protein NusA
MSKELLGALDTLESEKGIKKEVVIEALEAALVSAYKRNYGQAQNVEVDFDQIKGNIHVYAVKEVVEDVFDSRLEVSLQDALAINRAYEIGDDIRFEVTPKNFGRIAAQTAKQVIMQRVREAERGIIYDEYSQYENEIVTGEVERQDNRFVYVSLGKVEAVMGRSDQLPGEVYRIHDKIKVYVSKVENATKGPQVFVSRTAPDLLKRLFEQEVPEIFDGIVEIVSIAREAGDRAKVAVRSNNPNVDPVGTCVGPKGQRVQTIVNELHGENMDIVEWTDDQAVFIANALNPAEVLDVIFDPENERGCTVVVPDYQLSLAIGKRGQNARLAAKLTGFKIDIKSETEASDIMDANPDDVAVAETETTEAASDAAVQSDTGEDEEPAMSDAAVATPASETAVDESASDAE

SEQ ID NO: 567 - protein, 396 aa, Lactobacillus casei; identical to SEQ ID NO: 207
  source 1..396: note = SBI04895_ Phosphoglycerate kinase

SEQ ID NO: 568 - protein, 132 aa, Lactobacillus casei; identical to SEQ ID NO: 201
  source 1..132: note = SBI04895_30S ribosomal protein S8

SEQ ID NO: 569 - protein, 168 aa, Lactobacillus casei; identical to SEQ ID NO: 209
  source 1..168: note = SBI04895_50S ribosomal protein L10

SEQ ID NO: 570 - protein, 100 aa, Lactobacillus casei; identical to SEQ ID NO: 210
  source 1..100: note = SBI04895_50S ribosomal protein L23

SEQ ID NO: 571 - protein, 560 aa, Lactobacillus casei; identical to SEQ ID NO: 211
  source 1..560: note = SBI04895_Arginine--tRNA ligase

SEQ ID NO: 572 - protein, 196 aa, Lactobacillus casei; identical to SEQ ID NO: 212
  source 1..196: note = SBI04895_Protein GrpE

SEQ ID NO: 573 - protein, 417 aa, Lactobacillus casei
  source 1..417: note = SBI04895_protein NusA
MSKEMIQALDALEQEKGVKKEVVIEALEAALVSAYKRNYNQAQNVDVEFDPKQGDIHIYAVKEVTDEVFDSRLEVSLKEALAINKAYEIGDQIKFEVTPKDFGRIAAQTAKQVIMQRVREAERSIVYDEYSQYEDEILQGVVERRDNRFIYVNLGKIEAVLGRQDQMPNEKYEAHDRIKVYVTKVENTSKGPQVFVSRTHPGLVKRLFEQEVPEIFDGTVEIVNIAREAGDRTKIAVRSTNDAVDAVGTTVGPRGARVQAVVNELSGENMDVVQWEEDPADYIANALNPAQVIAVQFNDEANDRSATVIVPDYQLSLAIGKKGQNARLAAKLTGYKIDIKPESEVEFVDDDELPEAEAEAAAETNDNADAATDAETTPDSDAAAADDADDAKTAADAPDSADQAPVTPSATDHPAQA

SEQ ID NO: 574 - protein, 405 aa, Leuconostoc pseudomesenteroides
  source 1..405: note = SBI04900_ Phosphoglycerate kinase
MAKLTVSDLELSGKKVLMRVDFNVPIKAGVIGNDNRIVAALPTIKYVLENNGRAILFSHLGRIKSEDDKKELSLAPVAARLGELLGKDVKFVPFTRGAKLESAINALQDGEVLMVENTRFEDVVDGVEVKNESKNNPELGKYWASLGDDLFINDAFGTAHRAHASNVGIASNVSQAAAGFLMEKEIKFLGDAVANPVRPFVAIIGGAKVSDKIEIVKSLLSKADKVIVGGGMAYTFDAAKGEKIGNSLFEADKVELAKELMAEAGDKLVLPVDSIAADAFSNDAKTEVVDATAGIPDGYMGLDIGPKSVKLLQDTLSDAKTVVWNGPMGVFEMPNFAKGTLAIGEELVKVTENGGTTIVGGGDSTAAVQQLGVADKLTHISTGGGASLEYLEGKELPGIASISEK

SEQ ID NO: 575 - protein, 132 aa, Leuconostoc pseudomesenteroides
  source 1..132: note = SBI04900_30S ribosomal protein S8
MSMTDPIADLLTRIRNANLAHHEVVEIPASKIKKSIAEILKSEGFIRDVEYIDDNKQGVIRVFLKYGEDRNRVITGIKRISKPGLRKYAKAEDLPKVLNGLGIAIISTSAGVITDKEARSKQVGGEVLAYVW

SEQ ID NO: 576 - protein, 188 aa, Leuconostoc pseudomesenteroides
  source 1..188: note = SBI04900_50S ribosomal protein L10
MSEKAIAVKAQKVEEIADQFKDAASAVVVDARGLTVAQSTDLRHQLREEGVVLEVIKNKILTRAAEKAGYAELNDIFAGPSAVAFSNDDAVAPARILKKFADANEALQIKGGVVDGNIASLDDINKYASLPSREGLLGQLMAEFQFSIRSFAYAVKAVSDKLEEEGGATTEATPEEAPAAEEAAPDAE

SEQ ID NO: 577 - protein, 95 aa, Leuconostoc pseudomesenteroides
  source 1..95: note = SBI04900_50S ribosomal protein L23
MDARDIIRRPIITEASMAQTERKRYVFEVDTRAKKPEIKKAIEEIFDVKVSGLNTANVRGKLKRQGRYVGYTRKLKKATVTLSKDSKDIQIFNEG

SEQ ID NO: 578 - protein, 563 aa, Leuconostoc pseudomesenteroides
  source 1..563: note = SBI04900_Arginine--tRNA ligase
MSNNQPVIAALAAVLTDLSTEQIVEKLEAPKSSELGDVAFPTFTLAKTLHKAPQQIANDIVAKIDQNGFEKVVATGPYVNFFLDKYATSNQTIKTIIDLKGAYGDNINGNGANVTIDMSSPNIAKPMSMGHLRSTVIGNALANITKKNGFNPVKINHLGDWGTQFGKLIYAYKTWGSEAEVKADPIATLLRYYVEFHEKAKEDDSLNDQGRAWFKKLEDGDEEAHQLWQWFRAESLKEFTQIYDRLDIEFDSFNGEAFYNDKMDKVVDILTDKEILIKSQGAQIVDLSAINPNLTPAMIKRSDGATLYMTRDLAAAIYRKETYNFAKSLYVVGGEQREHFVQMKAVLSLMGFDWADDVEHIAFGLITFNGKKMSTRKGDVVLLKDVLDDAHELALKQIEEKNPELQNKPLVAEQVGAGAVVFHDLMNDRTNNFDFNLEEVVRFEGDTGPYVQYTNARAKSILRKANTEIDPTTLNLNDDSTWDIVTTLNIFPQTVERAWQQREASVIAKYALTLSRAFNKYYANSKILTVDDQLNARLALVQAVSIVLTESLRLLGVKAPEEM

SEQ ID NO: 579 - protein, 186 aa, Leuconostoc pseudomesenteroides
  source 1..186: note = SBI04900_Protein GrpE
MTDKNEEVVEEQVVDDEATTQEVEADVDDLQTDVDPRQSQIDELTAKVTELEDKLLRSQAEIQNIQQRNARELQSIRKYDGQRLATSVLPAVDNLERALAVEADDAVAKQIKTGVEMTLKTLTQALTDNGIAATGKVGDTFDPTKHQAIQSVDSDEVEVDQIAQVLQKGYTLQDRVLRPAMVAVAK

SEQ ID NO: 580 - protein, 366 aa, Leuconostoc pseudomesenteroides
  source 1..366: note = SBI04900_protein NusA
MSKELVDALDALEAERGIDRSVVVDALEDALKAAYKKQYNTADNVEATFDDKKGNISIKQVKNVVLDDDLEDDETEISLSDALALNRAYEAGDEIRFDVTPKDFGRMAAQAAKQVIVQKMREASRQAVYNKFAEYENEIITGEVDRQDSRFLYVNLPGNQEAVMAPNDQMPNERYRMGDRIKVLVNKVENNAKGPQIFVSRTAPDLVKRLFEQEVPEVYDGTVEIMSIAREAGDRSKIAVYTHDGDLDPVGAMVGQRGARVQSVVNELAGENMDIVEWVEDEAQYIANALNPSEVTDVIFDSENDRAVTVIVPDNQLSLAIGKKGQNARLAARLTGFKIDIKSESEAAEALAQKPADDKQIDEDEE

SEQ ID NO: 581 - protein, 400 aa, Pediococcus pentosaceus; identical to SEQ ID NO: 532
  source 1..400: note = SBI04902_ Phosphoglycerate kinase

SEQ ID NO: 582 - protein, 132 aa, Pediococcus pentosaceus; identical to SEQ ID NO: 533
  source 1..132: note = SBI04902_30S ribosomal protein S8

SEQ ID NO: 583 - protein, 168 aa, Pediococcus pentosaceus; identical to SEQ ID NO: 534
  source 1..168: note = SBI04902_50S ribosomal protein L10

SEQ ID NO: 584 - protein, 95 aa, Pediococcus pentosaceus; identical to SEQ ID NO: 535
  source 1..95: note = SBI04902_50S ribosomal protein L23

SEQ ID NO: 585 - protein, 562 aa, Pediococcus pentosaceus; identical to SEQ ID NO: 536
  source 1..562: note = SBI04902_Arginine--tRNA ligase

SEQ ID NO: 586 - protein, 190 aa, Pediococcus pentosaceus; identical to SEQ ID NO: 537
  source 1..190: note = SBI04902_Protein GrpE

SEQ ID NO: 587 - protein, 362 aa, Pediococcus pentosaceus; identical to SEQ ID NO: 538
  source 1..362: note = SBI04902_protein NusA

SEQ ID NO: 588 - protein, 400 aa, Pediococcus ethanolidurans; identical to SEQ ID NO: 511
  source 1..400: note = SBI04910_ Phosphoglycerate kinase

SEQ ID NO: 589 - protein, 132 aa, Pediococcus ethanolidurans; identical to SEQ ID NO: 512
  source 1..132: note = SBI04910_30S ribosomal protein S8

SEQ ID NO: 590 - protein, 168 aa, Pediococcus ethanolidurans; identical to SEQ ID NO: 513
  source 1..168: note = SBI04910_50S ribosomal protein L10

SEQ ID NO: 591 - protein, 95 aa, Pediococcus ethanolidurans; identical to SEQ ID NO: 514
  source 1..95: note = SBI04910_50S ribosomal protein L23

SEQ ID NO: 592 - protein, 562 aa, Pediococcus ethanolidurans
  source 1..562: note = SBI04910_Arginine--tRNA ligase
MDYKKQIAQSIVKALDGKLEEQSVYEKIEVPKTVNLGDYAFPTFILAKTLHKAPQMIAKDLVDQINQTNYEKVEAAGPYVNFFLDKSTFSDEVLQTVLTQNSHYGDATVGNNGKVPIDMSSPNIAKPISMGHLRSTVIGNSLANLLTKTGYQPVKINHLGDWGTQFGKLIEAYKLWGSEEEVKADPINKLLEYYVRFHKEDKDHPELDDEARKWFKKLEDGDDEAIQLWQWFRSVSLQSFKRIYDKLGITFDSYKGEAFYNDKMDEVVQILEDKKLLKESQGAEIVDLDKYNLNPALIKKTDGATLYITRDLAAAIYRKRTYDFVQSLYVVGAEQINHFKQLKAVLKEMGFDWSDDIHHIPFGLITLNGKKLSTRSGRVVLLDKVLDDAIDLAKQQIQSKNPDLKNADQVAHEVGVGAVIFHDLKNERMNSFDFDLNEVVRFEGETGPYVQYTRARAESILRKADHKVAVADLKLSDPNVWETLKFLQAFPETVLRAVREYEPSIIAKYALHLAKSFNQYYANSKVLVKDDQLNSRLALVQSVSIVLEIALNLLGVQAPSEM

SEQ ID NO: 593 - protein, 198 aa, Pediococcus ethanolidurans; identical to SEQ ID NO: 516
  source 1..198: note = SBI04910_Protein GrpE

SEQ ID NO: 594 - protein, 367 aa, Pediococcus ethanolidurans
  source 1..367: note = SBI04910_protein NusA
MSKEMINALNTLEEEKGIKKEVVIDALEAALVSAYKRNYGQAQNVDVEFDDKKGDIHVYAVKEVVEEVLDDQQQVSLSDALNINKAYELGDHIKFEVTPKNFGRIAAQTAKQVILQRVREAEREIIYNKYSEYENEIMTGEVARRDNRFVYVDLGGVEAVMSKQDQIPTERYEPHDHIKVYVTKVENSGKGAQVFVSRSTPDLLKRLFEQEVPEIFDGTVEIVSVAREAGDRAKVAVRSNDPDIDAVGTCVGPRGQRVQTIVNELNGENMDIVEWEDDPAKYISNALNPAEVVDVLFDEENERTCMVIVPDYQLSLAIGKRGQNARLAAKLTGYKIDIKSETDAKDLVEQPNEEDTTDSDSKTDDNE

SEQ ID NO: 595 - protein, 403 aa, Lactobacillus harbinensis
  source 1..403: note = SBI04913_ Phosphoglycerate kinase
MAKLIVSDVDVKDKKVLMRVDFNVPIKDGKIGDDNRIRAALPTIKYIIEHGGKAILLSHLGRIKSDEDKAKLSLKPVAARLSELLNKPVEFVPVNEGKELEDAINKLQDGQVLLMENTRFQDIDNDFGKRESKNDPKLGQYWASLGDVFINDAFGTAHREHASNVGIATAMKAAGKPVAAGFLMEKEIKFLGEAVDNPVHPFVTILGGAKVSDKIGVIDNLIPKSDHILIGGGMAYTFLAAQGHKIGKSLYEPDKEDLAKQLLAKAGDKIVLPVDNVVAKEFSNDVPYETVGVDVPDDELALDIGPKTVALFKEKLQGAKTVVWNGPMGAFEMSHFAKGTLEVGQALGDLQGATTIIGGGDSAAAAEQLGIADKITHISTGGGASLEYLEGKTLPGIASISDK

SEQ ID NO: 596 - protein, 132 aa, Lactobacillus harbinensis
  source 1..132: note = SBI04913_30S ribosomal protein S8
MVMTDPIADYLTRIRNANMVRHESLEVPASKMKKDISEILKREGFIRDYEVIDDDKQGIIRIFLKYGKNNERVISGLKRISKPGLRSYVKSSDVPKVLNGLGIAIISTSQGVITDKEARAKDVGGEVVAYIW

SEQ ID NO: 597 - protein, 169 aa, Lactobacillus harbinensis
  source 1..169: note = SBI04913_50S ribosomal protein L10
MPKEATIAKKAAVVDEVTDKFSRAKSAVVVDYLGLTVDEDTKLRKQLRDEGVELEVIKNTYLRRAAEKSGYEGLDDTFTGPTAVAFSYEDVAAPARVIYKFAKTAKNLEVKGGMIEGKVASMDQLSELSTLPDREGLLSMLLSVLQAPVRNVAYALNAVADSKNDEPAA

SEQ ID NO: 598 - protein, 94 aa, Lactobacillus harbinensis
  source 1..94: note = SBI04913_50S ribosomal protein L23
MAARDIILRPVVTEQSMALMDDKKYTFDVAIGANKIAVKHAVEEIFDVHVKSVNIANIKPKKKRVGQYIGRTKKRRKAIVTLSADSKEIKLFEE

SEQ ID NO: 599 - protein, 567 aa, Lactobacillus harbinensis
  source 1..567: note = SBI04913_Arginine--tRNA ligase
MDLRHTVAEKISQALNQIDASLTMDQVADLLEVPKSLDLGDFAFPAFQLAKTLHKSPVQIAQQLAPLVNADGLQKVEAKGPYVNVFLDQPVFAHTTFHAILSDPASYGAADIGHGGNVPIDMSSPNIAKPMSMGHLRSTVIGNALANIFSKLGYHPIKINHLGDWGTQFGKLIVGYKMWGSEEAVKENPIKNLLAYYVRFHQEDKDHPEMDDEAREWFKKLEEGDPEATKLWAWFREISLKEFQKVYDQLGVTFDSYNGEAFYNDKMDEVIQILEQKGLLEKSQGADIVDLSDQDLNPALIRKSDGASLYMTRDLAAAIYRKRTYNFVKSLYVVGGEQKEHFDQLKAVLKKMGFDWADEIVHVPFGLITENGKKLSTRSGRIILLEKVLQDAVGLAQKQVDEKNPTLANKEEVAHQVGVGAVVFHDLKNDRMDNFDFNLEEVVRFEGETGPYVQYTNARAQSILRKAGKTEADLIDAAALDDAGAWEVIRTLGDFPEIITRAAREYEPSVIAKYALRLAKAFNKYYAHTKVLTGDADQDSRLALVASVSAVLQSALALLGVGAPAEM

SEQ ID NO: 600 - protein, 219 aa, Lactobacillus harbinensis
  source 1..219: note = SBI04913_Protein GrpE
MAKEREHETKKKEDFPSEDHVQEKDTAAQIHAHVQTGRKKQPESTEDKVLDETKADLDDLIKGPSTAALEKENKELKDKVAQLEDKYLRAEAEMRNMGNRQKKEIDGMIKYDGQRLAKSILPVADNLERALAAEVNADGMAQLHKGVEMTHEHLIHSLAENHITEIAAAGEKFDPTKHQAVSTAPADKDHPADTVVQVLQKGYMLRDRVLRPAMVVVAQ

SEQ ID NO: 601 - protein, 366 aa, Lactobacillus harbinensis
  source 1..366: note = SBI04913_protein NusA
MSAEMLTALDELERQKGVKKEVVIDAISAALVSAYKRNYGQAQNVEVDFDNKTGEFHVYAVKEVVDTVFDSRLEVALKDAIAINKAYEVGDHIRFEVTPEHFGRLAAQTAKQVIMQRIREAERSIVYDEYSQYENEIMSGVVERRDNRFVYVDLGRIEAVLSKQDQMPNESYNAHDRIKVYVSKVENSPKGPQVFVSRTNPDFVKRLFEQEVPEIYDGTVEVAGIAREAGDRTKIAVKSNDPHIDPVGTCVGPKGQRVQAVVNELHGENMDIIQYEDDPAEYIANALNPAEVIAVQFADDDERNCTVIVPDEQLSLAIGKRGQNARLAARLTGYRIDIKPESEVEFVDDDGDVEDPDTPQTNGDEK

SEQ ID NO: 602 - protein, 398 aa, Lactococcus lactis
  source 1..398: note = SBI04916_ Phosphoglycerate kinase
MAKLTVKDVELKGKKVLVRVDFNVPIKDGVITNDNRITAALPTIKYILEQGGRAVLFSHLGRVKEEADKAGKSLAPVAKALSEKLGQDVVFPGTTRGAELEAAINELKDGEILLVENTRFEDIDGKKESKNDPELGKYWASLGDGIFVNDAFGTAHRAHASNVGISANVDKAVAGFLLENEIAYIQEAVEAPERPFVAILGGSKVSDKIGVIENLLSKADKVIIGGGMAYTFLKAQGYEIGTSLVEDDKLDLAKELLEKAAGKLILPLDHKVANAFAGYTEVKETADQNIPAGFMGLDVASKTIADYNTQLEGAKTVVWNGPVGVFENPDFQAGTVGLMEAIVKQPGVKSIIGGGDSAAAAINLGYADKFSWISTGGGASMELLEGKVLPGLAALTEK

SEQ ID NO: 603 - protein, 132 aa, Lactococcus lactis
  source 1..132: note = SBI04916_30S ribosomal protein S8
MVMTDPIADFLTRIRNGNMRKFDVVEAPASKIKRQIAEILKAEGYVKDVEYVEDNKQGVIRVFLKYGKNGEKVITNLKRISKPGLRVYVKSDDIPKVLNGLGTAIISTSTGVVTDKVARETNVGGEVIAYIW

SEQ ID NO: 604 - protein, 171 aa, Lactococcus lactis
  source 1..171: note = SBI04916_50S ribosomal protein L10
MSDYKVNEATIAKKAELVDVYAQKMTEAASIVVADSRGLSVDQDTQLRKQLREAGVEFKVVKNSVLRRAAEKAGLEGLSEAFSGPSAVAFSNEDVVAPAKVLADFAKDAENLEIKAGVIEGKVSSKEEIQAIASLPSRDGLLSMLLSVLQAPVRNVALAVKAVAEKEESAA

SEQ ID NO: 605 - protein, 97 aa, Lactococcus lactis
  source 1..97: note = SBI04916_50S ribosomal protein L23
MSLYDIIRKPIITEASMAAMDQKKYTFEVDSRAHKLLIKQAVEAVFGVKVASVNTISVKPKSKRVGKYTGTKSGYKKAIVTLTEDSKTIEIFGEDAE

SEQ ID NO: 606 - protein, 564 aa, Lactococcus lactis
  source 1..564: note = SBI04916_Arginine--tRNA ligase
MDEKQLVSQALSAAIDGVLGVEQIAAIIEKPKSSDLGDLAFPAFQLAKTLRKSPQIIAGEIAEKIDTKGFEKVIAVGPYVNFFLDKNATASEVIREVLTEGEHYGDANIGQGGNVPIDMSAPNIAKPFSIGHLRSTVIGDSIAKIYEKLGYQPIKINHLGDWGKQFGLLITAYKKYGDEATITANPIDELLKLYVKINAEAKEDPEVDEEGRQWFLKMEQGDEEALRIWKWFSDVSLIEFNRIYGKLGVSFDHFMGESFYSDKMDAIVEDLESKNLLHESKGALIVDLEKYNLNPALIKKTDGATLYITRDLATAAYRKKTFNFVKSLYVVGGEQTNHFKQLKAVLKEAGYDWSDDMVHVPFGMVTQGGKKFSTRKGHVVKLEMALDEAVDRAEKQIEAKNPNLENKEEVAKQVGVGAVKFYDLKTDRNNGYDFDLDEMVSFEGETGPYVQYAHARIQSILRKANRKVDINNISLAVSDAEAWEIVKALKEFPNVVKRAADNYEPSVIAKYAISLAQAFNKYYAHVRILEDDAQLDGRLALISATSIVLKEALRLLGVAAPENM

SEQ ID NO: 607 - protein, 179 aa, Lactococcus lactis
  source 1..179: note = SBI04916_Protein GrpE
MSEETKEEIKNEKVDEEVTEELTEEALEDIVEEEINELDEAQKLATEWENKFLRVSAEMQNVQRRGNEERLQLIKYRSQDLAKKILSSLDNLERALAVEGLTDDVKKGLEMVQESLISALKEEGVEEVSYESFDHNIHMAVQTVPADDEHPADSIVQVFQKGYQLHERLLRPAMVVVAQ

SEQ ID NO: 608 - protein, 382 aa, Lactococcus lactis
  source 1..382: note = SBI04916_protein NusA
MSKEMLNAFAMLEEQKGIKSEIVIEAIEQAITAAYKRQYGQAQNVKVIFDEKKGNFNVYSTREVVDEVFDSRLEISLEDAHELNPHYEIGDKIMFEEKPKDFARTAAGAAKQVIMQKMREEERTIIYNEYSRYKDEIIQGTVEKVDARAVYVNLGRVDALLTKKDQIPQENFHVGDRVKVYVTDVVLTPKGTRVFISRTAPDMLKRMFEKEIPEVFDGTVEIKSIARDAGDRAKVIVQSHDENVDAIGTMVGAKGSRIQGIIRELAGEKMDIIEWSEDKATLVANALKPARIEQVLITADGSSLAVVARDQLSLAIGKRGQNVRLAAHVTNSKIDIKAADEFNLDDYEFVGEDGEEIPTTEVNETLVVEEVVETPEVSESEE

SEQ ID NO: 609 - protein, 398 aa, unidentified
  source 1..398: note = Lactococcus prophage; SBI04918_ Phosphoglycerate kinase
MAKLTVKDVELKGKKVLVRVDFNVPIKDGVITNDNRITAALPTIKYILEQGGRAVLFSHLGRVKEEADKAGKSLAPVAKALSEKLGQDVVFPGTTRGAELEAAINELKDGEILLVENTRFEDIDGKKESKNDPELGKYWASLGDGIFVNDAFGTAHRAHASNVGISANVDKAVAGFLLENEIAYIQEAVEAPERPFVAILGGSKVSDKIGVIENLLSKADKVIIGGGMAYTFLKAQGYEIGTSLVEDDKLDLAKKLLEKAAGKLILPLDHKVANAFAGYTEVKETADQNIPAGFMGLDVASKTIADYNTQLEGAKTVVWNGPVGVFENPDFQAGTVGLMEAIVKQPGVKSIIGGGDSAAAAINLGYADKFSWISTGGGASMELLEGKVLPGLAALTEK

SEQ ID NO: 610 - protein, 132 aa, unidentified
  source 1..132: note = Lactococcus prophage; SBI04918_30S ribosomal protein S8
MVMTDPIADFLTRIRNGNMRKFDVVEAPASKIKRQIAEILKAEGYVKDVEYVEDNKQGVIRVFLKYGKNGEKVITNLKRISKPGLRVYVKSDDVPKVLNGLGTAIISTSTGVVTDKVARETNVGGEVIAYIW

SEQ ID NO: 611 - protein, 171 aa, unidentified; identical to SEQ ID NO: 604
  source 1..171: note = Lactococcus prophage; SBI04918_50S ribosomal protein L10

SEQ ID NO: 612 - protein, 97 aa, unidentified; identical to SEQ ID NO: 605
  source 1..97: note = Lactococcus prophage; SBI04918_50S ribosomal protein L23

SEQ ID NO: 613 - protein, 564 aa, unidentified
  source 1..564: note = Lactococcus prophage; SBI04918_Arginine--tRNA ligase
MDEKQLVSQALSAAIDGVLGAEQIAAIIEKPKSSDLGDLAFPAFQLAKTLRKSPQIIAGEIAEKIDTKGFEKVIAVGPYVNFFLDKNATASEVIREVLTEGEHYGDANIGQGGNVPIDMSAPNIAKPFSIGHLRSTVIGDSIAKIYEKLGYQPIKINHLGDWGKQFGLLITAYKKYGDEATITANPIDELLKLYVKINAEAKEDPEVDEEGRQWFLKMEQGDEEALRIWKWFSDVSLIEFNRIYRKLGVSFDHFMGESFYSDKMDAIVEDLESKNLLHESKGALIVDLEKYNLNPALIKKTDGATLYITRDLATAAYRKKTFNFVKSLYVVGGEQTNHFKQLKAVLKEAGYDWSDDMVHVPFGMVTQGGKKFSTRKGHVVKLEMALDEAVDRAEKQIEAKNPNLENKEEVAKQVGVGAVKFYDLKTDRNNGYDFDLDEMVSFEGETGPYVQYAHARIQSILRKANRKVDINNISLAVSDAEAWEIVKALKEFPNVVKRAADNYEPSVIAKYAISLAQAFNKYYAHVRILEDDAQLDGRLALISATSIVLKEALRLLGVAAPENM

SEQ ID NO: 614 - protein, 179 aa, unidentified; identical to SEQ ID NO: 607
  source 1..179: note = Lactococcus prophage; SBI04918_Protein GrpE

SEQ ID NO: 615 - protein, 382 aa, unidentified; identical to SEQ ID NO: 608
  source 1..382: note = Lactococcus prophage; SBI04918_protein NusA

SEQ ID NO: 616 - protein, 400 aa, Pediococcus parvulus
  source 1..400: note = SBI04919_ Phosphoglycerate kinase
MAKLTVSDLDVNDKKVLMRVDFNVPVKDGVIGDDNRVVAALPTIKYIIEHNGKAILFSHLGRVKTEDDKKALTMRPVAQRLSDLLGKPVTFVPATHGKQLEDAIADMKDGDVLLFENTRFEDLDGKKESGNDAKLGQYWASLGDEFVNDAFGTAHRSHASNVGISTAMKAAGKPVAAGFLMEKEIKFLGNAVDNPKHPFVAILGGAKVSDKIGVIDHLLDKADKVIIGGGMTYTFYAAKGLKIGNSLVEKDKIDLAKQILAKAGDKIVLPTDNVVAEKFDNDVPNKVVEGDIPDGYMALDIGPKSIKAFEDVLKDAKTVVWNGPMGVFEMSNYAKGTLEVGKFLGTLSDATTIVGGGDSTAAVKQLGVGDKLTHISTGGGASLEYLEGKTLPGIAAISDK

SEQ ID NO: 617 - protein, 132 aa, Pediococcus parvulus
  source 1..132: note = SBI04919_30S ribosomal protein S8
MSMTDPIADFLTRIRNANMVRHESLEVPASTIKHDIAEILKNEGFIKNVEYVDDDKQGIIRVFLKYGKNKERVITGLKRISKPGLRSYVKADDVPKVLNGLGIAIISTSEGVITDKEARAKKIGGEVLAYIW

SEQ ID NO: 618 - protein, 168 aa, Pediococcus parvulus
  source 1..168: note = SBI04919_50S ribosomal protein L10
MSKEAIAKKSAIVDTAVDYFSKAASAIVVDSRGLTVAEDTELRKELRDAGVTLHVIKNKILTRAAEKAGYKELNDIFVGPSAVAFSDEDPVAPAKVLKKFADEHDALTLKGGMIEGKVATLDEINTYASMPSREDLLSMLANVLQAPVRNVAYAVKAVADKKSEEDAA

SEQ ID NO: 619 - protein, 95 aa, Pediococcus parvulus
  source 1..95: note = SBI04919_50S ribosomal protein L23
MESRDVILRPVVTEASMAEMDNKRYTFDVDTRATKTEVKKAVEDVFDVKVVKVNIMNVKGKLKRQGRYSGYTKKRRKAIVTLSSDSKEIKLFNEE

SEQ ID NO: 620 - protein, 562 aa, Pediococcus parvulus
  source 1..562: note = SBI04919_Arginine--tRNA ligase
MNYKKQVAQSIVDALDNQLDEQVVYEKIEVPKATNLGDYAFPTFVLAKTLHKAPQMIAKDLVEQINKSGYEKVEAQGPYVNFFLDKGTFSNEVLQTVLTQNSHYGDATIGNNGKVPIDMSSPNIAKPISMGHLRSTVIGNSLANLLSKTGYQPVKINHLGDWGTQFGKLIEAYKLWGSEEEVKADPINKLLEYYVRFHKEDQEHPELDDEARKWFKKLEDGDKEATELWQWFRSVSLKSFKRIYDKLGITFDSYKGEAFYNDKMDEVVQLLEDKNLLKESQGAEIVDLDKYNLNPALIKKTDGATLYITRDLAAAIYRKRTYDFVQSLYVVGAEQINHFKQLKAVLKEMGFDWSDNIHHIPFGLITLNGKKLSTRSGRVVLLDKVLDDAIDLAKQQIQSKNPDLKDADKVAHEVGVGAVIFHDLKNERMNSFDFDLSEVVRFEGETGPYVQYTRARAESILRKSDHKVKITDLNLADPNAWETLKFLQAFPETILRAVKEYEPSVIAKYALHLAKSFNQYYANSKVLVEDDDLNARLALVQSVSVVLEIALSLLGVQAPSEM

SEQ ID NO: 621 - protein, 201 aa, Pediococcus parvulus
  source 1..201: note = SBI04919_Protein GrpE
MAEDKKTEKIDETVEKQTKETKKTKVKPDKKVKGEKKSKKQSKTATQIEELKKQITELNGKVDAITDQYIRAKAETANIQKRNEKEQANLVKYDGQHLAKDILPVIDNLERALAIEVSDENGKQLKKGIQMVFDHMNKALKDNHVTEIEAVGQPFDPHIHQAVQTVAVEEGGKADQVVSVLQKGYMLKDRVLRPAMVVVSQ

SEQ ID NO: 622 - protein, 367 aa, Pediococcus parvulus
  source 1..367: note = SBI04919_protein NusA
MSKEMISALNTLEEEKGIKKEVVIEALEAALVSAYKRNYGQAQNVDVEFDDKKGDIHVYAVKEVVDEVLDDQQQVSLSDALSINKAYELGDHIKFEVTPKNFGRIAAQTAKQVILQRVREAEREIIYNKYSEYENEIVTGEVARRDNRFVYVDLGGVEAVMSKQDQIPTERYEPHDHIKVYVTKVENSGKGAQVFVSRSTPDLLKRLFEQEVPEIFDGTVEIVSVAREAGDRAKVAVRSTDPDIDAVGTCVGPRGQRVQTIVNELNGENMDIVEWEDDAAKYISNALNPAEVVDVLFDEENERTCMVIVPDYQLSLAIGKRGQNARLAAKLTGYKIDIKSETDAKDLMEEPEEDDVTESDSESEDNQ

SEQ ID NO: 623 - protein, 224 aa, Saprochaete ingens
  source 1..224: note = SBI04932_Exoribonuclease, phosphorolytic domain 1
LDGRRWNELRRFNCKISTHSNSADGSSYVELGLTKIICLVNGPHEPESRSHTNVDQAHINVEVKILPFSTIERTKKRGKNDKNLQEMGISIQRLFQEALLVHLYPRTVIDVSLFIVAQDGGLYSACINAATLALIDAGISMVDYVSCASTAMFGTNALLDPSYSEEREVPFVNVAIIGKSERISLLLCESRLPLDRLETALAVSLSGCHSLRELMDKEVRAHGK

SEQ ID NO: 624 - protein, 667 aa, Saprochaete ingens
  source 1..667: note = SBI04932_Heat shock protein 70 family
MLKLKSQLTSWSVLLYISLLVLLPFLSQTKAENDTDKVSGPVIGIDLGTTYSCVGVMRGGRVEILANDQGNRITPSYVAFNGEERLIGDAAKNQAASNPENTIFDIKRLMGLPFKDASVQRDIKRLPYNVINRKGNPAVKVEFAGEEKIFTPEEISSMVLTKMKSIAEDYLGEEVKYAVITVPAYFNDAQRQATESAGEIAGLKVLRIINEPTAAAMAYGLDKSDGERQIIVYDLGGGTFDVSLLSIDNGFFQVLATAGDTHLGGEDFDYRVIRHFTKLFNKKNNVDITTNPKSIGKLKREVEKAKRTLSSQMSTRIEIEAFFDGLDFSETLTRAKFEEINLDLFRKTLKPVEQVLKDAKVSKSEVDDIVLVGGSTRIPKVQELLETYFKGKKASKGINPDEAVAYGAAVQGGVLTGEDGTGDIVLLDVNPLTLGIETTGGIMSTLIKRNTVIPTRKSQIFSTAVDNQPVVLIQVYEGERTLCKDNNLLGKFELTGIPPAPRGVPQIEVTFELDANGMLKVGALDKGTGKSESITITNDKGRLSQDEIDRMVEEAEKYAEQDNALKEKVLARNNLENYAHSLRNQIKDDKLGEKLDEDDKDTILEAVNDVFEWLEEVGQDASKEDYEEKKETLSSIAYPITSKLYENAEGSGDYADEDDDYFDNDEL

SEQ ID NO: 625 - protein, 448 aa, Saprochaete ingens
  source 1..448: note = SBI04932_NADPH-sulfite reductase
VAIIGSGPAGFYTALRLLERLPVTRVDMFEALPVPFGLSRFGVAPDHPEVKACQDRFTEVAHYPGFNYIGNTEVGRDVALADLKANYHAVILAYGSHKDRLLGIPGENSPGVFSAREFVGWYNGLPEHAGLDVPLDMAEDVTIVGNGNVALDVARILLADTSRLKSTDITEHAYEKLKTSKIKRVRIAARRGILQSAFTTKEVRELINEPNVYMNPLKDEYLDQVRPFLPVLERTRKRLVSVLEKNSKLARPEGVEKTWTLDYLISPIEIKASGNGKTLESTTFEVNNLVQPELSSPARAIGSGQHVTFKNELLFRSIGYKSVPLEGLHTGLGVEFDQARGIVPNTDGRVAPGVYAVGWVKTGPTGVIAHTMGESFEVAENLIDDYKQGIVGTEQNRPGFSGIKDKITSRIVGWGDWEKIDAAEKTKGLSEGKPREKFTSVDEMLNVL

SEQ ID NO: 626 - protein, 672 aa, Saprochaete ingens
  source 1..672: note = SBI04932_p-loop containing nucleoside triphosphate hydrolase protein
NETINKLDQERDYYGVDVHSLLHQISTDEDTQLAKSLETNNKPHIKLDGLLSEKYRPQKWTELLGSEKSHRQLMKWLQGWSPAVFKTAIPAQPSSNDPFDRPQRRIFLIHGPPGIGKTTFAHVIAKHAGYDILEINASDERAGPIVKEKIKSSVATHRVFSEKPVCIIADEIEGASEFGFIRALVDIIQSDTKATQALLRNAKPPKNTRLLMRPIIAICNDVYAPSLRTLRPLAEVVPYRRVSANLVAEKLKLVCSNEHIPSDSRFLLKIANDTESDMRSCLNILQFGINSSSRDKSTSLKDQEKSWTTVVNRIFQKTKGSHNKTETTSVLQDIDSCGEYDRIINSCFTMYPTMQFNDDLLQKPIRFGDWLYFHDLINRGIYVNQHGSLAEYHGYVPLACHNMFSSYSNNTSSYSTGLEHRENLKQNQQLRDEFFSFTSAGSKRTFNKSETTVELLPYLLRLLNPFVNQSMNAKNGNSFKKLDPSDRRYANIVALMTDYNLSFQTKILETPDPSIPTGIGGVVYQLYPSIEQLSTFGEREQLIAGAGTYSLRHLINHELETLKYTPKSQENNFTFVKRSKASEREDSVLKRKLDAEANKNKTGGPSSEPKTKRQNVDFFATFKKPSGKKSKESEKRASQSVPVISTEKRVWVQFNESFSNAVRRDISWQDVF

SEQ ID NO: 627 - protein, 445 aa, Saprochaete ingens
  source 1..445: note = SBI04932_PAN2-PAN3 deadenylation complex subunit PAN3
QQDMYYSHASTFPLNYHLYAPSSGTDKSLASYQRRPEDFFISNNLREELQRKNEATLQTLPGSNLPEYVHVYHSLVPIETNMEHSTQVFGYPTWAYKATSSKDGRVYCLRRIVGYRLTNEKAISIVQVWNSIKSPSIVGVVEAFTTRAFGDSSLVFVYEYFPLAKTLEEVHFGSEMYQQMNRIQMSEGLIWRYIVQIASAVRSIHGAGLAARQIEPKRILVTGHSRIRLNCCGIFDILNYDLGHNISELQKEDITSLGKIVLMLANNSVGAALHLNSAIETIERVYSKDLSDLIKGIFVDGSVTNVDEVVAKSAPRLLDSFNDTLDYNTYLENELSKTLENGRVARLLIKFGMINERPEYDHDPAWSETGERYPIKLFRDFLFHQEDDNGKPVVDMGHVLRHLNKLDAGIEESIMLVSRDEQTCLLITYKELKACVESAFRELSK

SEQ ID NO: 628 - protein, 924 aa, Saprochaete ingens
  source 1..924: note = SBI04932_Ribosomal protein S5 domain 2-type fold
LTRIIANAVVLHEDKDYYPSQREVYGEDVETMVQERDNQSLSEPIIKPVENKLFIIEEKELPTVNYTWSWQSSLMGLPEHIRNIAIVGHLNHGKTSLLDLLVKETHVLPDRDRAKIDEQLRYTDTHILEQERGLTIKSSPISLVLQNTKEKSYLFNIMDTPGHVNFLDEVSVATQFVDGLVLVVDVVEGLMITARKVIEQACLEKIPIVLVLNKVDRLILDLKLPPSEAYYKLRYCIDQVNTLIKENTFNDDEFVPLSPEKGNVVFASSTSNFIFSTYSFALHYKETSPSVDAVGFSKRLWGDIYYNPESRKFSRKPLENGAKRTFEHFILDPLYKIFTSVLEKEKEDLSETLAKLNIYLKPSTYSIDVRPLLQTVCQLFFGNSAALVDAVLEHIKSPTENAKAKVERAFTGPLDSEVAKSMSACDSNGPLVIHIAKLFSSPDSKEMYALGRVMSGTISQGQRVSVLGETYSEYDTEDLNETTVSGLWVYQSRYKIPMEGVPAGNWALIKGVDSSIVKSATIYSADFNDDMHIFKPISYMGEAIFKVAVEPVNPSELPKMLEGLRKVSKSYALLQTKAEESGEHVILGSGELYMDCVLYDLRILYADMAIKVSDPVVRFSETCIETSRARCYAITPNKQNKISIIAQPLDKSVAADIEAGNVVLEWGPKKVAKYMNQNHDWDLLAGRSIWAFGPEDNGPNVLMDDTIPDEVDKKLLFSVKESIKQGFQWAVRDGPLCEEPIRNTQYKIVDVVLASQPNLRNSNQIISTARRACYSAFLAAAPRLMEPIYQFHIVVPYDHASALSQTVERRRGYIASDKPVAGTQLRLVTGTIPVIDSIGFETDVRIVTKGFASVSLLFHEWDNVPGDPLDSTQRIPQLEPAPQSAMAREFIVKTRRRKGLSDDLPLTKLFDPSLVKTLQEADLL

SEQ ID NO: 629 - protein, 220 aa, Saprochaete ingens
  source 1..220: note = SBI04932_Ribosome assembly factor mrt4
VALTQTDKKTREDKERIGEEIRESVDKYAYTWVFGVDNMRNTFLKDIRQDWRGSRILFGRTRVMQKALGRTPETAHRDNINKLTRHMSGDIGLLMTDESPKVVRDYFASFVKTDFARAGLVAPLDFTIPAGIVYSTGGRLAPEDDVPMAHSLETMLRQLGMPTQLKNGKVVLGTDYTVCKQGQVLDGKQTRLLKQFGVACADFKIKLVAHFDRDASEVIV

SEQ ID NO: 630 - protein, 764 aa, Saprochaete ingens
  source 1..764: note = SBI04932_WD40-repeat-containing domain
GGVLPFVRPIFTPSKKFIIILTSLELRVYLFATRQCVKSIPLDTTDIVDIYLNKDDKLWVARKTGLVSIIDLESKSIEKEINFDIPIIKIIDIVSEDRFIFLVGKLKSTIKIVDLHKNIDEEAESFDTQVIASVKHSRGWAISHSGKCFALSSLKDKIETIHVGGLDNDYKLAGDIANVQRTRWSASLAVSNDGILAVGSLSGVIDVYYNVFNDSGKHSQPHALKWHIDAVSALSFSLDNNYIISGGKERVLAFWQLETNRSQLLPRLNGDILSITVDSSNELYALYLSNGEMIVLSAIDLMSRLQVAGLNADFVRLPARKKYKNVEDNYKVPDFTAPHYINPLTGHSYIPTASGSSIQIYDTVQDQQVSTFAIASTIQTGKVRVEKQITDPKVKHVAFTKDGKWMATVDEYLPPQLEGLLSANDKQVNLKFWKYNQADGKWALTTRVAFPHGNGKSILDIVSADSSFHKGHAFLTCCENGGIRLWRPEVLREIQTPKGAKNAAPTRHISWAVRKVLPPLASNSSGASIAWSSDSSMIILGFETTLYVVDAASFEIVRVLPNILGSRVRWLKIVDSHLIVLAKTRLVVYDLVNSKCKWSIRLISNQNGGRLIDVDPSNGLIALAANCIKLPDSTLESRIFLLSTESPVPIYTTTHSVPISNISYVPGSSTPKFRLLDTNSRLITLQSTADSDADAAAQADIIDGFEASLGALYSKQQSKPVVKAVDFDSVTHLVTVDSFDDVFEDSELGVASMSALFDKVLGVL

SEQ ID NO: 631 - protein, 599 aa, Saprochaete ingens
  source 1..599: note = SBI04932_Zinc finger C2H2-type
YDILGVEKRATDDELKRAYKKMALKLHPDRNYANVDEATAQFAKVQAAYDVLSDPQERAWYDAHGIAGGMGFSKYDDDAGAGKVTTAEELKRYFDPMLYANVTDAPDGIYQVAAGIFSRIAREEAEAVFDQGLDDDDYAQLPTFGDSQSNWARETKQFYDTWLNFTSRKTFAWHDQYRTKDAPDRRTRRAMENENKKARDAARKEFNETVRALVSFVRKRDPRFKLRQKHTGATKMSAKAQANAAAAQASRDRKANVERREEYEEQEWEKIEGEDIDEYFSDIEEKKKARRRAKNGFIDSSDDDSDSGDDESVIDSGAEDEDEEVIDLFECVVCDKTFKTRKQFVSHEQSKKHIKALQKLKYEMQKEGIDLGIDGDNTATNGNKSKSSKSNNLEESDFDSEAEEEEFVPKKQVPKPSFSVLMQDDDDDDDEEEEKEDVPAPASKTPTPPKKGKESIQDLLSQLEGTKLGGGANDSDDDWSTNTKSKKGKKKGKQPAAAGGSKKKQNGNKSDTTTIPRELQGFLVAEDDANVGDAAASDIASGNGKLGKAKLKKLKRTQLNDVSLTCTVCHTEFPSRNKLFDHVKVSGHAAAPPNTGKRK

SEQ ID NO: 632 - protein, 381 aa, Saprochaete ingens
  source 1..381: note = SBI04932_Zinc finger, RING/FYVE/PHD-type
TTMRFAVYSLISCGLTVLVVSLALVSRPNFYSAAVSVYNNSASLLVILNMMLIIMLLSGKTLQLLFFGQLRELELQHLYERAIYAATDAFLLLTVFKDEFEFYFSLFLGLLFFLRVFHWIIGDRVDLIFHTTQATTLFMHLRLASAIVLLGCVDLFLTRYCVTHMDPKKPAGGMVMFAFEFALLSNRLLQTTGRYILNIIENWYLNNHEEEDAWEGKSLWTFVVEVAADSTRLLTYIAFFFVILNPYGLPPLHILRDVYITVTGLFTRVFDFIKARHAQAAMDQEILTATEEDLARDNVCIICREEMSLENLTHRSTPKKLSCNHIIHYGCLKSWLERSLRCPTCRRPVLGHHDTIPVNNNANPNNANINDGVVINIQGNN

SEQ ID NO: 633 - protein, 400 aa, Lactobacillus plantarum; identical to SEQ ID NO: 186
  source 1..400: note = SBI05399_ Phosphoglycerate kinase

SEQ ID NO: 634 - protein, 131 aa, Lactobacillus plantarum; identical to SEQ ID NO: 187
  source 1..131: note = SBI05399_30S ribosomal protein S8

SEQ ID NO: 635 - protein, 167 aa, Lactobacillus plantarum; identical to SEQ ID NO: 188
  source 1..167: note = SBI05399_50S ribosomal protein L10

SEQ ID NO: 636 - protein, 97 aa, Lactobacillus plantarum; identical to SEQ ID NO: 189
  source 1..97: note = SBI05399_50S ribosomal protein L23

SEQ ID NO: 637 - protein, 562 aa, Lactobacillus plantarum
  source 1..562: note = SBI05399_Arginine--tRNA ligase
MDYKQLVAAALAPALPDLTQEAILDKIEQPKTSKQGDLAFPTFTLAKTLHKAPQMIASDIVEKVDGSDFEKVVAMGPYVNFFFKKDAFAADILNQVLSNGGHFGDAKLGEAGQVPIDMSSPNIAKPISMGHLRSTVIGNSLANILSKLDYQPVKINHLGDWGTQFGKLITAYKMWGSEAEVKVDPINNLLKYYVRFHKEDVDHPEMDDEAREWFKKLENGDEEATHLWSWFRSESLKAFKKIYQRLDIDFDSFKGEAFYNDKMQEVVDILEDKHLLQESQGAEVVDLSKYDLNPALIKKSDGATLYITRDLAAAIYRKRTYDFVQSLYVVGNEQTNHFKQLKAVLTEMGFDWADQIHHIPFGLITSGGKKLSTRSGRVILLDKVLDDAVALAHEQIEAKNPDLPNKDEVADAVGIGAVVFHDLKNERMNSFDFNLEEVVRFEGETGPYVQYAHARAESILRKAGSPEIAATEQTLSDPAAWDTLKLLSEFPATVVRASTEYEPSVIAKYAIHLAKAYNKYYANTKILVEDDELNARLALVKSVSIVLKEALRLLGVKAPDEM

SEQ ID NO: 638 - protein, 202 aa, Lactobacillus plantarum
  source 1..202: note = SBI05399_Protein GrpE
MKTLAKKSTRTTPEDSQASTTDSAAMSTASEATQAATSATDDQAEQTTAVDPTQQITDLKAQLDAKDDQLLRAQAEIVNMQNRNKKEQAALLKYDGQALAKDVLPVLDNLERALATPADDEAAQQLKKGVEMVYGHLQDALKKHGVTEVAAAGEKFDPNIHQAVQTVPVDDDHPADTVVQVLQRGYLLKDRTLRPAMVVVAQ

SEQ ID NO: 639 - protein, 405 aa, Lactobacillus plantarum; identical to SEQ ID NO: 192
  source 1..405: note = SBI05399_protein NusA

SEQ ID NO: 640 - protein, 245 aa, Monosporozyma servazzii
  source 1..245: note = SBI05419_Exoribonuclease, phosphorolytic domain 1
MSRLEIYSPEGLRLDGRRWNELRRFESSVNTHPHASDGSSYLEQGNNKIITLVKGPKEPSLRSQLDPNKATLKVTTNITQFSKFERAKSSHKNERRVLEIQTALVRTFEKAIMLHIYPRTVIDIEIHVLQQDGGIMGSLINGITLALVDAGIAMWEYISGISIGLYDTTPLLDINSLEENAMSSVTLGVVGKSEKLSLLLVEDKIPLDRLENVLAIGIAGAHRIRDLMDQELRKHAQKRVKNASS

SEQ ID NO: 641 - protein, 682 aa, Monosporozyma servazzii
  source 1..682: note = SBI05419_Heat shock protein 70 family
MLFNRANSSKWLAPLSVLFYILFMVALPFNNGNNKSSFLVHAEETDSYGTVIGIDLGTTYSCVAVMKNGKTEILANEQGNRITPSYVAFTDEERLIGDAAKNQVASNPQNTIFDIKRLIGLKYNDRSVQKDIKHFPFTIINKDGKPAVEVTVKGEKKNFTPEEISGMILGKMKQIAEDYLGHKVTHAVVTVPAYFNDAQRQATKDAGTIAGLNVLRIVNEPTAAAIAYGLDKDETEHQIIVYDLGGGTFDVSLLSIENGVFEVQATSGDTHLGGEDFDYKIVRQLIKTFKKKHGIDVSDNNKALAKLKREAEKAKRALSSQMSTRIEIDSFVDGIDLSETLTRAKFEELNIDLFKKTLKPVQKVLEDSGLDKKDIDDIVLVGGSTRIPKVQQLLESYFSGKKASKGINPDEAVAYGAAVQAGVLSGEEGVEDIVLLDVNALTLGIETTGGVMTPLIKRNTAIPTKKSQIFSTAVDNQPTVMIQVFEGERAMSKDNNLLGKFELTGIPPSPRGVPQIEVTFALDANGILTVSATDKGTGKSESITITNDKGRLSKEDIERMVEEAEKFASEDESFKAKVESRNKLENYAHSLKNQVNGDLGEKLEEDDKETLLDAVNDVLEWLDDNFDSAMGEEFDEKFEGLSKVAFPITSKLYGATGEGASAGSYDDDDEDDDGDYFEHDEL

SEQ ID NO: 642 - protein, 475 aa, Monosporozyma servazzii
  source 1..475: note = SBI05419_NADPH-sulfite reductase
KTISIIGSGPSGFYTAYRLLKKSPTPIHVRLWERLPVPYGLSRYGVAPDHPEVKNCEETFKTCAQEYLSGMKDTHKNSFEFIGGVNVGGPHVKLQQLMENEDVVIFSYGCQADRQLNITGEKDTKGVFTGREFVNWYNGHFDNALSDKFNKFPWSKIKKVGIIGNGNVALDVTRVLISNQVDEIWSGTDISTLALNHLKESQVEDIKLIGRRDFIHSKFTNKELRELWELEKYGIKGSIDGAFFNKDKFDYSTMERAMKRRIEMCDEYMKPFDQRSKKNYKKFPPLETTGTQRHWSLDYLKTPLRINKDSNGFIKSLTLCHNIVTPENKVIPQKDQELTYDIDLLITSLGYKGVPLPEFEKLNIGFQHDHISNIRGRVLSRDGEVLPRLYASGWIRKGSQGVIASTMQDSFEVADMVMDDLLAASSVGKQRGGCLDLSTIPHSTWSQWEAIDQEERRRGQEHCKPRDKFLSLEDI

SEQ ID NO: 643 - protein, 796 aa, Monosporozyma servazzii
  source 1..796: note = SBI05419_p-loop containing nucleoside triphosphate hydrolase protein
LPLPQFSLGQSSLFHAGPGSVEMNTAAEPDSMEKDDGISLKDSNDEITQFRSSSGNVISLSRKKDDGPKLNNDISTHFNNISWKDDDSYGININLLLDKIAAKDDHAPIAENTTATENIKLKDTSIAKNNKNSNTKNKDKLWVEKWRPKHFLDLVGNEKTNRRVLGWLRQWSLAVFKEDLGLSPFQKIMMEKNPQLLQEEQDDLYHRPKRKILLIHGPPGIGKTSVAHVVAKQAGYSISEINASDERAGPMMKHKIHNTLFNHTFNEKPVCLIADEIDGAIESGFVKVLLDILYNDIKATKKARFNKDSGLTPQQQKKSKRKDNKNLKTSKVLLRPIIAICNNLYAPALEKLRPFCEIVSFKRPNDNALQERLTHICDREHLNVSIKILKNLIDLAQGDVRNCINNLQFMTTNIPKQDMQETNTNNNVWESNQKDTSILWFKLVSQIFQRDPYKDLRTQFYELLSNIEQNGNYERIIQGCFNVYPSVKYTDNGVTKPSEIADWLYFHDLMQKSLYEQNGELLKYSSVIPLVFYTKFSDIANNKEEIRIKSMEYEMREKRKQNEAIVKSIIDKIAAQQPHLAETLSMKSLLFEILPYLNDIVSTDLIKIKNVPLKNDIVNTISDILRQYQLSLLPIENEYPHLHQSATVLGVSPPFNKAVVYDEPKNKEIYIKRPQSLHLLLAKSEEMKVKKRHLNQIQKEKEGLEENKLKTKKSKISGSNTIDFFRNQYDSINSQLDEQHNQSTLKKKDQSPFPASSSDTTVVGSDKDNDHSRVWVKYKAGFSNAVKKNVTWDTLW

SEQ ID NO: 644 - protein, 782 aa, Monosporozyma servazzii
  source 1..782: note = SBI05419_PAN2-PAN3 deadenylation complex subunit PAN3
MDKINQEWAKDIPCRNVIIYGYCKKQKEGCPFKHDDNVVENTSVISVPTTINNITDNDNNNNNNISTDNISLDNGNRIISPRLNNAHIKESTPVSHSQIIGPPNGISLSELPSLTKNNITNTSVRSNDITNSPPQNVASPSFSKFNAKMSATFTPMFGGGGNDSIDNGTNENTNNGNINNNTKITLNSNMSNLSIDHPTITKPDTPLSYKNNNMESMNPLGLSSMNQSLLKNSANMYAPLSSSPTFNLPSFPQLQQTQAQAQAHQQLAGGFPIPSLPLPQGNGPNTIMGGATAPSNSTSNGISSTTVPLNYPSIYPPPHSILQYHLYFPETPQQLKLSMKPNEKTPDELFIPNNIREQLVKKNLASLQNFPPGGPLPDLIKDYFGLVPLDFHEKKTDVDRYEGHKNSLFKVFSNTDGKLYVLRRIHGIKSNAIDAQYLAKVFQNWKKLQNINVVTLKDVFVTTKFNDSSLCLIYDYYPKAISLYEAHFINFPLLPITQDYLWTYLIQLSNAIKSAHNLDLILGDLINWKVIVTNIPAMIRISGIAAHDLLSNNLNKSALEINQLKQQDYVRLGQLLIKLASNIKPPTASSNNTAPSSASSTVHEHNTNKVQKDLVEIDQLQVDGSFKEVLKYLTDESNDNKNIKDLSLLFIDQLYLNFNALKHYDEFLNKTLQTELENSRLFRIICKMNFIFGRIESRIDINWSESGEKFPIILFYDYVFHQIDEMGKPVMDLTHVLRCLNKLDAGVSEKLVLVTPDEMNCIIISYKELKDLIESTFRSLTQ

SEQ ID NO: 645 - protein, 936 aa, Monosporozyma servazzii
  source 1..936: note = SBI05419_Ribosomal protein S5 domain 2-type fold
MEEELFDEFGNLIEPNGQPEPHTVAVPASQDDDHDEDMGQGAGDEENSRALITRDTNINLADVDILVETDNTQSLNEPLIKPEESQYNPKKYINSMMKSKTILPQVTYNREYMVSMCSIPERIRNVALIGPTNSGKTSLADLIVMEFHKINSLVGVNQSVKQGWKHLKFMDSFKQELERNISIKLNSITVLATDVNDKSMVLNLIDTPGHVNFMDEVAIALDACENVIICVDVIEGMTAVVEQLIKQSMKRGKEIIFIFNKIDRLILDLKLSPQDSYLKLLHLVASINQYVNYLSRKLERPTMRFSPELNNIIFASSKLGFTFTLEEFVHRHYKEKIPIYKDRQDFIEILWGEEHFIKFVLDPIYKVITHTLTYDDPIALVTKLIDLHILPKKTKIPKQLQDPQPILKFVMQNFMDNRQLGLYSAIQSMFPPLSKVVSQGMITHALKVMDYCGDEYCLVKVQANELKVGSTFRILSENEDDDDDDEDIQDFNVEEIMLMDGQYCIPLEIAYPGQIVLMKSDLKDRIVKCGTIYSCNKEDIPKSMRLFELDYINKSYFKIIIAPLQPRELPKLIAALDKINKYYPGVIIRVEESGEHVVLGTGELYMDCLLYDLREVYGKMEIKVSSPMTVFSESCEGESFAAIPVETMDSTIKLSVGASRMDLPVVKDISHGELTLGNDTKQLSRILRTKYGWDSLTARNVWSFHSTNVLIDDTLPDETNKDELKEFQDVIKQGFYWAVKEGPLCGEPIFGVQFKLLEFENSNDGKYGINMNQLIPTIRKACYIALMTASPVLLEPIYEVSIVTRNEYMEIVSQLFGKRRGGIIIDSKPIAGSPFVEIRAHLPIIESIGFEIDLRLVTKGQSTCQLQYINEIWKRVPGNVMDQDAIIPKLKPAARDALARDFVMKTRRRRGEQDPPSLTKYLEPDLYQELVQSGLI

SEQ ID NO: 646 - protein, 236 aa, Monosporozyma servazzii
  source 1..236: note = SBI05419_Ribosome assembly factor mrt4
MARSRRSKLVTLAKTDSKTREVKERVFDSVRESLDTYKYCWVLKLDDVRTPVLQEIRSQWVGSRLIMGKRKVFIKALGDTRENEYKENLFRLSAKIDGVVGLLFTNEDVSVVKDYFTAYERNDYSRAGSRAPMDFTIPEGIIYSRGGQIPMEDDVPMVHSLEPTMRNKFEIPTKIVKGKITLEQPYKVCSKGEKLDVRKSLILKQFGIAESKFKIKSQFYYDIEKSEVNEVNINLE

SEQ ID NO: 647 - protein, 924 aa, Monosporozyma servazzii
  source 1..924: note = SBI05419_WD40-repeat-containing domain
QNYNISVVSGGKPVLPRIADGITYGNTISNNKNISVLTHDQLHYIVPFNTQLKVYSLETRQCVKTIKFANNETLTSLFADASTFIVDILLNDITLDSAVPDDESKQKLITVITNKGHAVVLKYKGKLQETPKLIKLDGLQSNENVVKLFHSVESNQFKLLTAQLNNKTSSYHYKLYPIDFKSFKLDSKDCNDWNNVMLINWSNDNNTLSILHNKQGKQFTIASIFSQQFNVEIPFTSVFNDKHMAMSMKENNNSSNNSTAPNQQTINKFVTSLAIDNSRTQLAIGFASGVITMVSIHDNIDLQHLDLRYLKWHIDSVLSLTFNHDGSYLISGGWEKVLNFWQLSTNQQQFLPRLNGIVIDSQVLDSQGKYYSITLQLTENNSNNDYQILLLNSIDLTSKISIMGPMPIFQQQLSNVIVPTSTQNLNSSNVSTIKKHLKKLNKSAKTSTSSTSVNFTTPIEIHPSTKQLYIPHGQSLQRFDFYKNESTNLQFLTDGVQMHMGKVRNELKNIMDPQVKMLKITSDGKWLITYEIEYPPKDILSSNDLIYVLKCWSQRTDNNNNSNQNKDGAWELKTKIMNPHGVNVPIVTMITGHNENSLLTADNNGGIKYWEFDQYQNNWCLKKILVSNFNHFNNSVALQWSRDKSLIFHAFDDKLQIIDFESFKLWTPPSESQISNEFNMDSQIQCLQLINETNLIIVTMTGLLVLDLLLGKIINGFDLYPYVNENFKNGHLNRLISCDEKNDKIVLVINQREDVDDKIAKITFKSHVLVFNSNLTHQLGNFTHDQYIAWIGWNHDTDFLFIDIDSKLGIVSTTMNTEIADEVNKEGILDGLTVGTDATHPTTSTTAHKDYLEELRKLAASKQKPLEQQDSATQNTNNLDDLDSEIINGERNTALINMNSFSNMFENIQNVSMSTLFDNVIKTL

SEQ ID NO: 648 - protein, 623 aa, Monosporozyma servazzii
  source 1..623: note = SBI05419_Zinc finger C2H2-type
MKTCYYELLGVERTATDTDLKKAYRRKALQYHPDKNPDNVEEATEIFSTIRSAYEVLSDPQERTWYDDHREQILNDDMNLDDVDNDREVDSSITGVTTDELLMFFNGSLYNKLDNSPAGMYQIVGKIFAKLAMDEVYWLKRMNLDGKDKYKDDIFEKETNSVGYVNAVEDRLDEDNYLYPTFGHTKTDYQYLKQFYKRWSNFHSSKNFSWKDEYMYSSSYDRRSKREIKKRNDKARSDAKNEYIKTVKRFVTFIKKLDKRMKQGAAKEEEAKKLKEQQRKEALKKQREQKMKEFAPNGATNIELQSWQTNTNVNWDELEKVYEQQHNNDNKADEDDSPVSVAKEPDFVLNDDEILIYECYVCNKTFKSERQLENHNKTKLHRKNMHELKREIANENMSLGLDNLSDLSDFDSAEESVLNTPLEVPADLQNMSMEQLNEQLAKIEQQLAETNISDDDDEVDSSEREADMLPPVEMEDTKEEEIIIDEKTSDGESVINDSSESESEDEIDELTKILQSLEDKNNKDSGFKLDSSDDDDWGSNKNNNKKKKQRGKNKNKGKLSSVPSTTALDSKQPSEEPLASHTSERCATCGAVFESNNQLFKHVKAQGHAAPPGKVKTSKKKKK

SEQ ID NO: 649 - protein, 413 aa, Monosporozyma servazzii
  source 1..413: note = SBI05419_Zinc finger, RING/FYVE/PHD-type
VYALTIYTLWNTFRQSHSFLQWSIKLNQGFSFIIVCGFLLVNFLLMWQGATSALFGELRIIEQEHVFERLPLIVISIVMITSSFSSDQIFNVLIFSTGFLVMQVFTWILKDRLEGLLQTINGDTTLTKLVFSNFIRNMIIFAILNYFTTKYTFFNNLKPFYHNLINTNISLLIFGYNFTSILIQYLNILCHTILNLYAFYYTQSPHLHHNQNGDDNMEVDEEEEEEEEKDFEGKFIYEKCINFTTKLMDVILDFTLLIPFRFKTFYIKDLIWDLILLIKMGIDLFKIWQNNKKLDDKLPDIIAEDLIGHDNICIVCMDDLVELSHRKKHEIDVGDDEITYTQDDIKTMSKRKRPKILPCGHMLHFGCLKHWMERSQTCPTCRLNVFDNDGNVKPVKHHNVSAPTVIPQTTQQS

SEQ ID NO: 650 - protein, 244 aa, Kluyveromyces marxianus
  source 1..244: note = SBI05449_Exoribonuclease, phosphorolytic domain 1
MSRFEIYSPEGLRVDGRRWNELKSFNCSINTHPNAADGSSYLEQGNNKIITLVTGPQEPSSKGQVNVKQAKLSVTINQTKFAKMERSKSSHKNERRILEWQTSLVRTFEKSLMLHLYPRTSIDIQIHVLQLDGGILGAMLNGMTLALIDAGIAMYDFISGVSVGLYDTTPLLDLNSLEENAMSSVTIGTVGKTEKLSLLMVEDKIPLDRLESVMAIGIAGTHRIRDLMDKELRKHGKRRVGNSS

SEQ ID NO: 651 - protein, 679 aa, Kluyveromyces marxianus
  source 1..679: note = SBI05449_Heat shock protein 70 family
MFAGRKSSVGWLMSSVAAFYVLLAVIMPIALNGSQSSRVVVRAAEDHEEYGTVIGIDLGTTYSCVAVMKNGKTEILANEQGNRITPSYVAFTDEERLIGDAAKNQAASNTNNTIFDIKRLIGLQYNDPTVQRDIKHLPYKVVNKGNKPIVEVTVKGEKKQFTPEEISGMILGKMKQIAEEYLGKKVTHAVVTVPAYFNDAQRQATKDAGAIAGLNILRIVNEPTAAAIAYGLDKTENEHQIIVYDLGGGTFDVSLLSIENGVFEVQATAGDTHLGGEDFDYKLVRHFAQLFQKKHNIDVTKNDKAMAKLKREAEKAKRSLSSQTSTRVEIDSFVDGIDFSETLTRAKFEELNLALFKKTLKPVEKVLKDAGLQKEDIDDIVLVGGSTRIPKVQNLLEKFFNGKKASKGINPDEAVAYGAAVQAGVLSGEEGVEDIVLLDVNALTLGIETTGGVMTPLIKRNTAIPTKKSQIFSTAVDNQKAVRIQVYEGERAMVKDNNLLGTFDLTDIRPAPRGVPQIEVTFALDANGILTVSATDKDSGKSESITIANDKGRLSEEDIERMVEEAEKYAAEDAKFKAKSEARNTFENFVHYVKNSVNGELAEVMDEDDKETVMDNVNESIEWLEDNTDVAEAEDFQEKMASFKEAVEPILAKAAASQGSTSGEGFEEEEDDDYFDDEL

SEQ ID NO: 652 - protein, 468 aa, Kluyveromyces marxianus
  source 1..468: note = SBI05449_NADPH-sulfite reductase
ISIIGSGPSGFYTAHHLLQNAKIPLEVTIWEKLPVPFGLSRYGVAPDHPNVKNCEETFTDTVNKVRNDKDSIHKFNFIGNCEVGKDVQLSDLLKKQDAVVLSYGCATDNKLGIPGENDTDGVFTSRQFVNWYNGHPDFALHPKFMDFDWKSVRNVGIIGNGNVAIDIARLLLSSTVSSIWGSTDINPLALEKLRQAPIENVKIIARRDFPNSKFTNKEIREMWQLESYGVKGHIDSKFFTPEKWNMKEQARTFKRCVDLFSEYVKPYEERSAKYKKLPQPENGVFTKHWELDYLKTPLEIIKDGSSNRIKSLKLCNNTMSESNRVNAHPDKTLEYNLDLLITSLGYKGSPMSGFEELKIKFDRNKIANSQGRVLDTQENTIPGLYATGWIGKGAEGVILATMTNSFAVAENILKDLHSLPPKTTSIPSLENVNSTTWEDAEKILSFEEQEGKMKDKPREKLLTVQEML

SEQ ID NO: 653 - protein, 739 aa, Kluyveromyces marxianus
  source 1..739: note = SBI05449_p-loop containing nucleoside triphosphate hydrolase protein
LQVHEFDPSAKRFVSASGQTVSLRKRKPAHAALVEGQTTWTSDESYGVNVNTLLDRIGQGETPVERSVDTLVNESSGLANGKASGKASASASASANGTLWTEKWRPHKFLDLVGNEHTNRRILAWLRQWAPTVFDEPLPEAFGNGNASGADDTTPMDPLGRPTKRILLIHGPPGVGKTSVSHVVARQAGYSVVEINASDERAGERVRLKVQNALFNHTFNSKPVCLVADEIDGSVENGFIRVLLDIIKSDSNATKEMVLGGGKTNARARARARGKSQGKNKNKNQLLTRPIVAICNNLYAPALEKLRPHCEIIAFRKPSETALLERLELVCKTEKVPVSKAYLKDLAVLSQGDVRNCLNNLQFRAGTTTGTTSATTTSAPDDGKDIAISWYRICNAVFRKNPHMEPEVQLSHLLKDVETSGNHERVVEGCWTMYPETRYSDHGVSKPARISDWLFFHDRMFQSLFEHNGELVRYCSFTPLQFFVLFADNANKEGTKSRDSGTTSPSGVTSLFELREAERACMNLLDVVRSRLSVHSQVYTTKRSLLGETLPAVEDLISVDLSRIRDVPTRQRCVDTVLPLFHDFRLRIQEQTQGSINSSSSYTHLLVVDPPLDELVLLDEKRRRDVVTKKPAALKFSLAKLEEERIKKRALKAVADEKREQSEQKRRRMEAGTSGATGTTSTSTSTSTGNFMEQYNSIKKREHTPEAKDTASESRIWVKYKEGFSNAVRKNVTWSQLWE

SEQ ID NO: 654 - protein, 667 aa, Kluyveromyces marxianus
  source 1..667: note = SBI05449_PAN2-PAN3 deadenylation complex subunit PAN3
KDTPCRNVIIHGYCKFENEGCEFNHGKSKEPEDNGPVQRTVTPLNVRFNAKTSSSFTPGKSPTMRSTGDFSSLPSFQPGQSVIPDQNPVLQDGSMSSSGMLNANAASFAPSFNPYASESFTPSVSAGGGAGGGAGVGGNGGVPHSSEDLNGSIPSPVPSNPYPGSTGMPPVGILGVGHHMGPPLPSQGQSQGQGSVPPPHAHIHPHPHAPPPPPGSLPMNPIPPFPTVCPPTHSVLQYHLYAPDPPPHLKIPLKPNERTPEMLFINNNLRERLVKNNQTALQVFPRGSLPDIVGDYFGLVPMDFHNRTPDKKRYNGHKNSLYKVFSNQDGKIYFMRRIHDVKITESAQVSQPFQAWSKLRSANVTILRDAFVTTAFNDSSLCMVFDYYPQSTSLFEAYGLGASAPELSQDYIWSYLIQLTNALQDVHSHGLALKDLDWKKTIITGEPGRIKITDLGVYDTLNYQQEGRVLHDDQQQDFVALSELIMALVHKLTGTTGPIDTLNSYHIDPLFKKCVQYLQDSENKNKNIEEFTKIFSHKLLSVLNSLQYNVEYTEQQLSRELENARLFRLMCKINAIYGRLESRIDINWSESGEKFPIILFFEYVFHQKDETGKNIMDLTHVLRCLNKLDAGITERVMLVTPDEMNCIIISYKELKDLIDSTFRSIIQ

SEQ ID NO: 655 - protein, 941 aa, Kluyveromyces marxianus
  source 1..941: note = SBI05449_Ribosomal protein S5 domain 2-type fold
MDEDLYDEFGNFIGDPTELADSDDASESYESDDERNENERIEDDNENRDLVLRDNNGPLDEDVDVLVEIEDREPEKPLVEGSNGRRREEHDNANKRAPKVLFDRDYLMDIFKIQDRQLNIGVFGALHSGKTSFVDMFAMDTHQNLPSLTKKAKEGWEPARYLDNATIEKERGVSLRLNGMSFAYESSRGRTYAVTMLDSPGHVNFWDDVGITMRACQYGVIVIDVIEGINSIVSKLIRELSKNGIPFVIVLNKIDRLILDLKLPVVDAYHKLQHTVDEINTYTRKRYSPELGNVLFGSTKFGFLFSIDSFVASFYAKGLKQKTDQFVAHLWGQINYRDGGFYQTEFITESIAFIQFILKPIYKVFTQTLSASEDSLRRIIETHFHVRLSDELLAKDPQPLLYGVFHAILPHYTCFIDAIEHLNRERVVGITSTNADSDTGTTTIQVLRHMDHEGSSWSLCRVIAGSVKRGNKLFIFNEAVESVDASEENEHSKITVEKIALLGGRYVYEIKEAHKGQIVLLKGLEDQYTKYATLSSVIETPLPPIDFLNESVFKLALQPQKPSELPRLLKGLQKANYMYPALVVRVEESGECIIMGTGELYLDCVMEELRHTFSEIEIKVSPPLVQFAESCDTESFASIPVSSNNNIVSISVMAEKLDGKIVRDLTHGEISPAELNDARKFSKRLRTEYGWDSLAARNCWGLSQCNVFIDDTLPEETDKKLLKQFRPYILQGFEWAVKEGPLADERIHACQFKLLEFKLQKDKLDDFIPSQLVPMTRKACYIALMTATPIIMEPIYEVDIIVSGVLETVVEGLIKRRRGGRIYKTEKILASPFIEIKAQLPVIESVGFETDLRVATTGAGMCQMHFWNKIWRKVPGDVLDEEAFIPKLKPAPNASLSRDFVMKTRRRKGLSESGHVVQDGPSLKSYIDNELYEKLKQKGLV

SEQ ID NO: 656 - protein, 236 aa, Kluyveromyces marxianus
  source 1..236: note = SBI05449_Ribosome assembly factor mrt4
MPRSKRSKLVTLAQTDKKGRENKERIFDEVREALDSYRYVWVLHLDDVRTPVLQEIRNSWAGSKLIMGKRKVLVKALGEKPEEEYKENLAKLCKECSGLTGLLFTNEAVDVVEDYFKAYTRADFSRPKSKAPLTFTIPAGIVYSRGGQIPEEDDVPMVHSLEPTLRNKFKIPTKIKNGKITLESPFLVCEKGKTLDVTQALILKQFGIAAAEFKVKVAAYYDNESSSVEKVGINME

SEQ ID NO: 657 - protein, 849 aa, Kluyveromyces marxianus
  source 1..849: note = SBI05449_WD40-repeat-containing domain
DMYKLAVVSGGKVALPRIHNRSATRKSVTCITPDGSAYIVPFNNQLKVYSITTRQCIKTLKFANNEVLNSIFDDESVSVVHIEAVEDEEMDKIKIYTNTSKVVILKYKGKLDVEVVSLTLDITGELLAVLGNSSRLITVEQTGNSHRYNVYANVSSSSSKVTLLESFDNVLLSTWSNNSLYIAIVYKSQECKKQILIKSLLDDSVSQNFPVPCTTSSSTANSQYVTSLALDNNAEQLAIGFASGVINLINLPDLSNRLLKWHIDSVLSLGFTNDNAYLLSGGWEKVLSFWQLTTNMQHFLPRLNGIVLEALPANDKYYTLVLQFAENNTSSDYQITLLNATDLTSLLSINGPFPVFETVTPNVEQPISTVNSKSSVSSSNMLQSKKKQKRKLLKRKNHDFTSQLTVHPLTKHLYIPHVSSLQTFDLYKNEQVNYQYVSSSVNNAAGKVRLELTIQDPVVQDVKFTLDGLWMITYEVEYPPDGLLSSKELSHVIKFWKLDDNKEWQLKTKVLNPHGNNVPVTCIIPSPKSINSSQACLTADNNGGVKYWKFDTKQNNWCLNKLLLPNYNHFSGSVQLAWSLDGSLIFHAFEDKLSIIEFSEFKLLEGDDSLPIERTLDTPIQTLCLVNDSTLIIATKTSLHSFNLLTQSIISSFDIFPYLNGVYKPGHFARLLTCDANTGRVAFAINQPTIKEKDDVSNGKSLSLRHKSRILVFNSDLTEKLGSFGHNEYISSLVWNFGADFIFMDIKSRLGIVSTTASSEMVDESNNDQPFEALDPESFTYKLQQLTKKKTLDNTKIEETEDQNMDLEFINGNLSQNKTINMNSFTSLFENIDNVQMDTLFERVMKIIT

SEQ ID NO: 658 - protein, 613 aa, Kluyveromyces marxianus
  source 1..613: note = SBI05449_Zinc finger C2H2-type
MKTCYYDLLGVNSDASDSELKKAYRKKALLHHPDKNRDNIEDATEAFAQIRVAYEVLSDPQERAWYDSHKDQILNDFTVYDDNVENAANVDSELTGVTTEELLRFFDAGMYSRIDDSPAGLYQIAGKIFAKLASDEVKWGKRLNIQMFSDYLDDTFESDITLDSYKKSMDRHKNSNLLFPMFGYSETSFQDLKLFYKKWGSFSTVKTFSWKDEYMYSRNYDRRTKREINKRNEKLRNQARSEYNKTVKRFVTFIKRFDKRMKEGIRKEEEEKKKHMQDALKKQINKDKLNDRATRTKDFELQDWQAIDHDRLEEMEDFYTNENGGKKTFSGAQENLKDSCEEILIYECFVCNKNFKSEKQLQNHTNTKLHKKMLRQLKYEMKQESIALGLDNISDIEDYISAPESDFNDISNERDEGTFDRESSAVSEKYAYENINEELRKVEEVLKAISTSSSDDETDMNNDNYSDSFEIEYSIDDELEDKNGKITATTSKAESEEDYEDKNELAALLESLMNEKNDDWESMSNSATKKTKNKNKGKTKKSLSKNNQSNSQKSDSVTKNDKDLIAEKYDCSTCGVLFESRNQLFAHIKAENHAAFVPNSRNSKATKLKNKKK

SEQ ID NO: 659 - protein, 383 aa, Kluyveromyces marxianus
  source 1..383: note = SBI05449_Zinc finger, RING/FYVE/PHD-type
VSYIGAIWSLYTCITTSYSFLDAICMITEGSHALICGNFVLLHIILLSRWFVRFLFGELRLIEYEHILERISYVVLHFIMTYSGATDGHILSLILNCALLVFCKTLHWILRDRMDFTFQATAVHTRISSLICSKYMLSLLIILTMDGLLSLYYLSFFKQSSSVTEGIILFSEHLIISAEMVKILLLTGLNFLEIYTIKKRSRSHRIVEPVENDGIGQGIDLEEEDEDNLIGIEGKFIYEKLFEIITNTLQILIKFVASFLLSRPMTTISAFWDTAMTFKSARVLWKSWKGSKSLDASLKDATDSQIENGMFDLCIVCMEDFVSSSERKNEGKKVKILPCGHALHLSCLKNWIARSSTCPICRIPIFDQAGNIVPYPADQSSTE

SEQ ID NO: 660 - protein, 245 aa, Nakazawaea ishiwadae
  source 1..245: note = SBI05469_Exoribonuclease, phosphorolytic domain 1
MSRMELYSPEGLRVDGRRWNELRNFNCSINTHPSSSDGSSYVEMGNSKVICTINGPMEPLNRSQLNTTKAVLNIAINVATFSTVERKKRSRSDRRIHELNTILERTFEQAIMMKNYPRTLIDITVNVLAQDGGLLASCCNAITLALIDAGISMYDYISSISAGLYDVTPLLDLNTLEENDLSFLTIGVVGKTEKISMLLLENRMPLDNLEKVLSIAIAGSHRVRDIMDEEVRRHGNERLSKLEGK

SEQ ID NO: 661 - protein, 663 aa, Nakazawaea ishiwadae
  source 1..663: note = SBI05469_Heat shock protein 70 family
MLNINRSLITLAICLYAILVIVLPQHTAQAADDVENYGTVIGIDLGTTYSCVAVMKNGKTEILANEQGNRITPSYVAFTNEERLIGDAAKNQAASNPKNTIFDIKRLIGLKYNDKSVQKDLKHIPYDVIDKDGKPVVKVQYGGEDKVFTPEELSGMILGKMKSIAEDYLGKSVTHAVVTVPAYFNDAQKQATKDAGTIAGLNVLRIVNEPTAAAIAYGMDKGDGEHQIIVYDLGGGTFDVSLLSIESGVFEVLATSGDTHLGGEDFDFRVIRHFTKIFKKKHDIDVSDNAKAIGKLKREVEKAKRTLSSQISTRIEIDSFVDGIDFSETLTRAKFEEINLQLFKNTLKPVDQVLKDAGVKKDEIDEIVLVGGSTRIPKIQELLESYFDGKKVSKSINPDEAVAYGAAVQAGVLSGEETVDDIVLLDVNALTLGIETTGGVMTTLIGRNTAIPTKKSQIFSTAVDNQPTVLISVFEGERAMAKDNNLLGKFELTNIPAAPRGVPQIEVTFDMDANGILKVSATDKGTGKSEEIVITNDKGRLSKEEIERMVEEAEKYKEEDDALREKILSKNSLENLVSQLNSAEWLEKIDEEDKEILTDALQEVSEWLEDNEDATKEEYDEQKDKLNKVSNKIAEKLYGGAAGAPADDDDDDDEDFDYDHDEL

SEQ ID NO: 662 - protein, 471 aa, Nakazawaea ishiwadae
  source 1..471: note = SBI05469_NADPH-sulfite reductase
RFHSTKVAVIGSGPAGFYTAYHLLKKNQDLKVDIFEKLPVPYGLSRYGVAPDHPEVKNCQDTFKELGPLKNFKFYGNVEVGKDISLKELKDNYNCIVFSYGCDDDNISGLSKIPGIESKGVLSARKFVGWYNGLPQLQSLDPPLEKVEDVTIIGNGNVALDVTRALLQPLDVWRQTDMTENSIAKLSESKVKNVRIVARRGFLESAFTNKELRELLELKKNGIIFNFIYPEQIKSIAPLASQLGRIHKRRVDLITRAMKLNEKLQINDIKKTWMLDYLKSPIEINPSPIDPDLLESTTFAINRLQQDSPTGPTKIVHTNETITYKNELLITSTGYKGRPLVGFEEVGIPFDNFTGTIGNVGGRVVTDSNTNEYLKGFYTSGWISIGAMGVIMSTMMNGFQTGDLILEDLHLFKDDLKSGSEGIEKILQDRSVKFVSWKDWETIEKHEFEKGFKKGKVREKLCNVDDMLNVL

SEQ ID NO: 663 - protein, 666 aa, Nakazawaea ishiwadae
  source 1..666: note = SBI05469_p-loop containing nucleoside triphosphate hydrolase protein
KEIITSDGHVIRLKPRQKLELGFEISEDDNCGIVISELLDKIEYTENMKQNARQEETQIPQVNNNTNNTLWAEKWRPKTFLELVGNERTNRFALRWLRRWSKCVFGEQVISERNFNNTPATFQYKDPFDRPEKRIMLIHGPPGIGKTTVAHVIAKQAGYEVMEINASDERAGQRVKDKIVNSLNTQTFSGKPIVLICDEVDGSTESGFIRVLLDLIHHDSRATTRIMNKRDGINKKDYNKSKPKLLMRPIICICNDLYAHSLEKLRPYSEIVSFRKSSERTVKERLREICDKENLNVDTKELSEIVELTNCDIRSCLNLLQFSGGGSNGELRRKDSQINWFTVVKEIFKRDPKKMKRQQYNDLNKIISTNSHNERVVNGLFSLYHDVEYQDDLMTKPNDIGDWLFFHDYLNKSSFDLQNGELGSYCSQVPMKFFLSFSDPNNNHEKNLKPKSDYEYYETRRANIELQSKFMNGIAVELRSKLILSIISTQVLPFIDHLLVPEIKSPKFNLKPNDKKKIEDAIAILNEFGLNLESSRDETFMHFLRLYPAIDDITSFSTTTKKSQAKKLSIYPVLLQELDKIKNLKRKILEDQQLLESKINKRAKTDDATEKKFISTLDYFKSQYDGISNVTNVKKKVRDEESRIWVKYHEGFSNAVRKNITWEDLW

SEQ ID NO: 664 - protein, 649 aa, Nakazawaea ishiwadae
  source 1..649: note = SBI05469_PAN2-PAN3 deadenylation complex subunit PAN3
PANYDWAKEIPCKNITIYGYCKHEDKCAFKHNINNESPLTTPVSKVAALAVFTPSLRLTATTPSAITVDATEKKKFNFDSPSFTPTAPAVPQQQQQTTPANKYSSPKVSNVPTFIPGGDGSTSQQPQQLLQQQILKFNIDTPSFSPSSYAPATPVTQQQAIPSLQQRQQQGPATSAPPSQQQQQQQQQQGPPQSLLNNDMYYHQQVAPVATSAYPLQYHLYSQLPPPHFQLPLAAYERDMNTLFIPNQLRETLQRKNEASNQILPHSNLPDHINNYHSLVPIDNSFDNPSKAFGLLTQLYKVQSTLDGKLYCLRRIELQNPIIEKSITVVKKWNKIHSANIIKPLELFTNMSFNDNSLFLVYDYFPCSSTLIQNHFQPIGTGGKKPTVITETLLWSYMIQLTNAVVEAHSKKLAIRSFDLSKIVVTNENRIRLSGCGVLDILEYDEFEDFADLQKQDLQKFSELMITISSTTMPPNSRAAELSRDDLITILPLSDDFKSVLKYLNSSDVELQILQEKLAPHLLKTINGLQNSLDFMESQLSRELENGRLFRLITKLNFIVERPNFLQDESWSETGERYPIKLFRDFVFHQYNDLGKPLLDLTHVLSCLNKLDAGIDEKLLLVSSDEKSCLIISYKELKDLIDSSFRELN

SEQ ID NO: 665 - protein, 962 aa, Nakazawaea ishiwadae
  source 1..962: note = SBI05469_Ribosomal protein S5 domain 2-type fold
FGNLIGDPLDSDAESSEDEIPNFQLPLNSDLEEEDEDKEMVEETAIVLQEDKSYYPSVSETFGPDVETIIQTQDAQDISEPIVRPMARQTFQLQELSLPETTFSKEYMVELSKIPTRVRNVAIVGDLHSGKTTFIDMLILQTHPTLNNDNLRYTDNHKLENSKGLSLKCTPMTLLLPNLNDKSMMVNILDTPGHVNFFDEVSVAQLTTDSTVIVIDAVQGLSKMDKMIIETCLLKNISMSFILNKIDRLILELRLPPVDFYFKVRSLIDEINSFIEDKVTENYTFKTVMSPELGNVCFASSLYQFCFNLKSFIVTIYGDQVDIESFSQRLWGDIFYENGCFTTKPENKTESSRNRSFIKFILEPLYKIFNNSLTKSEKDLKEFLNKHFKLNIDRSWYKSDPQNLLKHILKQIFGTSKGFVDMLENTPSPATSYEKTISEIFTNENISELAKSCDSSKPVIAHVTKLIDTVDSKRFYGLVKVISGTLKLSASYKILGENYIDDDEDMLTNEKLTKLYINGARYKIPVESIPAGGIGLIMSDNLDSFISKTGTIYDQAFEPTTIFKPLDYNSQPVFKVAVEPKNPSELPKLLEGFRKINKSYVGCEIKVEESGEHVILGSGELYLDCLLHDLRFLYTDIEIKVSDPLTKFAETCVDLSITQIPIKSANGLNEVSIIIEPLESEVCKDIENEIITLSQPMRRISKWFREQYNWDSLASRSIWSFGSSNKYPNVLIDDTLPDEVDKLKLLSLKNFIIQGFQWATREGPLCDEPIRNLKFKIMKIKLADDLIDCNGGQIIPMIRNACYSAMLLSSPRLMEPSYQLNIVVKLANGQDPKFLISGLEDLLSKRRGNITNSKPIPATQLYRIQGLVPVLDSVGLETDIRVKTQGQAMCFLSFESWNIVPGDPMNKHAYLPPLKPVPYKSLARDCVLKTRKRKGLNGEPDLGKYIDLELLQEMKDNGIIEE

SEQ ID NO: 666 - protein, 225 aa, Nakazawaea ishiwadae
  source 1..225: note = SBI05469_Ribosome assembly factor mrt4
MPRSKRSKLVTLAQTDKKGRENKERIFDDVRSNLDTFKYCWVLALDDVRTPVLQEIRSSWVGSKLILGKRKVLQKALGTTREEEYKDNLYKLTSLLTGVSGLLFTDEEPETVQAYFAEYAKSDFTRANQVSPITFVIPEGIIYSRGGQVPVEEDVPMSHSMEETLRNKFNIPTKIKGGKIFLESPFKVIEEGQKCDVKQALILKTFGIAASEFKVKLLGFYNGED

SEQ ID NO: 667 - protein, 790 aa, Nakazawaea ishiwadae
  source 1..790: note = SBI05469_WD40-repeat-containing domain
SSYNWNISLQAGGKLLPVGQRLSLDGNYYIALFNHQIKVYYLATRQCIKTIPVDLSKLTIVDSIFSDENNNLFYIFDKDGEVILINWREKLLNSVLSRFKLPAPNMSILEIVSFNAKTKDTIAICGKYSTSKTSPRLTHIYKLSEGKQEQLLTIKNTLMFKTSLDHNKIIFLNNSNEIISVSIRDYNIAKTQTIPFVFKSKITCIAVSNNNSTEIALGTSSGIIQLIYENSDKPQRLLKWHIDQVRSLQFNHDNSYLLSGGLEKVLVFWQLDTDKQQFLPRLNGIIENIDIDPRVPELYSITLDVNNEIEFLILSASDLISRLTVDGLRPNLNLNNLNKLKKKISGSVVSDIKNDFTCSMEINPLTNHLYLPNGSSIQVYDIQKNEQLFVQTAVSTTQTGKVKSEQLILDPKIEILKFSNDGKWMCTFDSVPTPELDNLLSTKDIHYSLKFWKLVDNKDVRQSYWELSTKIIDPHGVKTPIVSIVLAPKNYHNGLLFLTADTKGGVRLWRPRIPKEIYNKVASTEKLQQTAWILKKSFHGNGTFETNSVSLSWSEDSSIIIIGYENSMNLIDCNTFKEVDEFHLPSLLGSRVRAVHIIENNVVALAKNRIISYDLLNAKNNELCGKIQTPTNGKNLIAVGQNLVALVVNYFNISDLNSKIFIFKPQSLKPVFIGNHSQYISSITYSESMNSFVFIDIDSRIGVISATTQDSISTASQDLNYAYELNVLLNNAQDKVKQLGTQDSQMDVDVIEEGEIVHSKVLNPHSFESILENIDGVQIESLFDRIMNVL

SEQ ID NO: 668 - protein, 567 aa, Nakazawaea ishiwadae
  source 1..567: note = SBI05469_Zinc finger C2H2-type
MKQCYYELLEVDSKASDSDLKKLYRKKALLLHPDKNPDNVEEATSQFNLVRAAYEVLSDPHERAWYDSHKNQILMEDEDFADEAGESSYEFAGTSTEEILRYFDPSMYSRIDDSLYGLYRVAGILFEKLSSEEVTLGKQQELANFGKYKDDTPMANAVDVNELLFPRFGNSNSDYATEVRTFYQAWSGFQTVKTFSWKDEYRYSRAQDRRTRRLMEKENKKYRDNARRDYNEAVRSFVSFIKKRDPRVKSGAAEYERNRRLKEQEERKKQAKRDKEANLARREEYEQQNWQTIDHEELAEIEEELNRLHEEELKLAKDEKEEQDLDIYECIICDKVFKTASQFQSHEKSKRHIKSLNRLKWEMRKEGIELGFDQLTDEEDFQTASSGSSDEEDEFVDETPLEKDIEPEIEEVKEDIDYEVDDDIDSEEDEEIVPMRNGRKQKKKKQKQQQNFKFSDHELELLLSEDELAKLVENLSKGVSITNNSSSEEDWDLSNKKKLKLKKTKKKKQDNASTPEPNIDTQKVTEETEKCSVCGDSFPSRNKLFQHVNATGHASVPTTKGKKGKKK

SEQ ID NO: 669 - protein, 517 aa, Nakazawaea ishiwadae
  source 1..517: note = SBI05469_Zinc finger, RING/FYVE/PHD-type
MDSAVARRNFLIYSGVSTVLAAISISNVLRQKPNFYSLLIALSHDVHIIVLSNFLIVSLILFGKMCQSILFGELRLIEREHVYERSWFTMMNLLMAIAMFRDENNLLIGFLILSLLFLKIFHWILVDRIQYVFQSNESIKDILLSRTSFTLILFLVLDYEMILNCIDNSFNGSPDVYVIFGFDFALLFFDLFEEFGKLVLNLIEIWYLDNNETDDVWEFKTVLLKFFEIGISFIKILTIFFNFFILIGPYRMPITVMRESYLTVSKFVGQISEFIRYRRAAKELDRRLQDATQEDLDHDDTCIICRDEMSVEVLRNTRLFPKKLNCGHVIHLGCLKSWMERSESCPMCRSPVFVPEQEQNQQQTQQQPQQNNIPPIIPQPRGRILTRLFGLPPFMRNRANNVPVPAQVQATAETENDEEEEDRPTPTPTTTPIYHEPIINLPSNTVILPPDWSVFPLMPRPQLDPRNAATTEFDIFLNPTTKGVVKTIKVHHQPLNLIPNPVEEIREVETGSSSSGD

SEQ ID NO: 670 - protein, 246 aa, Saccharomyces cerevisiae; identical to SEQ ID NO: 214
  source 1..246: note = SBI05473_Exoribonuclease, phosphorolytic domain 1

SEQ ID NO: 671 - protein, 682 aa, Saccharomyces cerevisiae
  source 1..682: note = SBI05473_Heat shock protein 70 family
MFFNRLSAGKLLVPLSVVLYALFVVILPLQNSFHSSNVLVRGADDVENYGTVIGIDLGTTYSCVAVMKNGKTEILANEQGNRITPSYVAFTDDERLIGDAAKNQVAANPQNTIFDIKRLIGLKYNDRSVQKDIKHLPFNVVNKDGKPAVEVSVKGEKKVFTPEEISGMILGKMKQIAEDYLGTKVTHAVVTVPAYFNDAQRQATKDAGTIAGLNVLRIVNEPTAAAIAYGLDKSDKEHQIIVYDLGGGTFDVSLLSIENGVFEVQATSGDTHLGGEDFDYKIVRQLIKAFKKKHGIDVSDNNKALAKLKREAEKAKRALSSQMSTRIEIDSFVDGIDLSETLTRAKFEELNLDLFKKTLKPVEKVLQDSGLEKKDVDDIVLVGGSTRIPKVQELLEKFFDGKKASKGINPDEAVAYGAAVQAGVLSGEEGVNDIVLLDVNPLTLGIETTGGVMTTLINRNTAIPTKKSQIFSTAADNQPTVLIQVFEGERALAKDNNKLGKFELTGIPPAPRGVPQIEVTFSLDANGILKVEAMDKGTGKSESITITNDKGRLSKEDIDRMVEEAEKFASEDASIKAKVESRNKLENYAHSLKNQVNGDLGEKLEEEDKETLLDAANDVLEWLDDNFETAIAEDFDEKFESLSKVAYPITSKLYGGADGSGAADYDDEDEDDDGDYFEHDEL

SEQ ID NO: 672 - protein, 484 aa, Saccharomyces cerevisiae
  source 1..484: note = SBI05473_NADPH-sulfite reductase
RHISSQINRKTVSIVGSGPSGFYTAYHLLKKSPIPLNVTIWEKLPVPFGLSRYGVAPDHPEVKNCEETFTTCAEEFSSPTNQKHKFSFVGGITIGKEILLKELLDNQDAVILSYGCTGDRKLNIPGELGTKGVFSSREFVNWYNGHPDFAKDKRFTDFDWSKVSKVGIIGNGNVALDITRVLISNQIDEIWENTDISSLALNLLRRAPVKDVKLIARRDFVHSKFTNKELRELWELEKYGIRGRIDPKFFQKEMFDPSKYDRAFNRRVEMCSEYLKPFNERSKKNYKKAPPPSSGYDKFWELDYLKTPLKINRDDFGAINSLSLCNNRLNEDNSLQPLKDVNNIMTYKVDLLITSLGYAGVPMPEFSKLSIGFDKDHIANKQGRVLTSSGEIFPHLYASGWIRKGSQGVIASTMQDAFEVGDRVIQDLVVSGALSLENSIDLSNIKHTTWKDWERINKKELLRGKKEHKTRSKFLTFEELWNGV

SEQ ID NO: 673 - protein, 734 aa, Saccharomyces cerevisiae
  source 1..734: note = SBI05473_p-loop containing nucleoside triphosphate hydrolase protein
IGSLGRSSLFDTGDIEQAPGNNAIGINEEDIHAFVSSTGETVQLKKKPAKLATGNISLYTNPDTVWRSDDTYGININYLLDKIEASGDDRTNAQKTSPITGKIGSDTLWVEKWRPKKFLDLVGNEKTNRRMLGWLRQWTPAVFKEQLPKLPTEKEVSDMELDPLKRPPKKILLLHGPPGIGKTSVAHVIAKQSGFSVSEINASDERAGPMVKEKIYNLLFNHTFDTNPVCLVADEIDGSIESGFIRILVDIMQSDIKATNKLLYGQPDKKDKKRKKKRSKLLTRPIICICNNLYAPSLEKLKPFCEIIAVKRPSDTTLLERLNLICHKENMNIPIKAINDLIDLAQGDVRNCINNLQFLASNVDSRDSSASDKPACAKNTWASSNKDSPISWFKIVNQLFRKDPHRDIKEQFYELLNQVELNGNSDRILQGCFNIFPYVKYSDNGIRKPANISDWLFFHDLMYQSMYAHNGELLRYSALVPLVFFQTFGDIANKDDIRMKNSEYEQRELKRANSDIVSLIMRHISVQSPLMASFTDRKSLIFEILPYLDSMISSDFNKIRNLKLKQAIMEELVQLLKSFQLNLIQNRSEGFDVRGGLTIDPPIDEVVLLNPKHINEVQHKRANNLSSLLAKIEENRAKKRHIDQVTEDRLQSQEMHSKKVKTGLNSSSSTIDFFKNQYGLLKQTQELEETQKTIGSDETNQADDCNQTVKIWVKYNEGFSNAVRKNVTWNNLWE

SEQ ID NO: 674 - protein, 679 aa, Saccharomyces cerevisiae; identical to SEQ ID NO: 218
  source 1..679: note = SBI05473_PAN2-PAN3 deadenylation complex subunit PAN3

SEQ ID NO: 675 - protein, 1004 aa, Saccharomyces cerevisiae
  source 1..1004: note = SBI05473_Ribosomal protein S5 domain 2-type fold
DDLFDEFGNLIGVDPFDSDEEESVLDEQEQYQTNTFEGSGNNNEIESRQLTSLGSKKELGISLEHPYGKEVEVLMETKNTQSPQIPLVEPVTERTKLQEHTIFTQLKKNIPKTRYNRDYMLSMANIPERIINVGVIGPLHSGKTSLMDLLVIDSHKRIPDMSKNVELGWKPLRYLDNLKQEIDRGLSIKLNGSTLLCTDLESKSRMINFLDAPGHVNFMDETAVALAASDLVLIVIDVVEGVTFVVEQLIKQSIKNNVAMCFVINKLDRLILDLKLPPMDAYLKLNHIIANINSFTKGNVFSPIDNNIIFASTKLGFTFTIKEFVSYYYAHSIPSSKIDDFTTRLWGSVYYHKGNFRTKPFENVEKYPTFVEFILIPLYKIFSYALSMEKDKLKNLLRSNFRVNLSQEALQYDPQPFLKHVLQLIFRQQTGLVDAITRCYQPFKLFDDKTAHLSSPGKSTPEGTLWAHVLKTVDYGGAEWSLVRIYSGLLKRGDTVRILDTSQSESRQKRQLHDISKTETSNEDEDEDDETPSCEVEEIGLLGGRYVYPVHEAHKGQIVLIKGISSAYIKSATLYSVKSKEDMKQLKFFKPLDYITEAVFKIVLQPLLPRELPKLLDALNKISKYYPGVIIKVEESGEHVILGNGELYMDCLLYDLRASYAKIEIKISDPLTVFSESCSNESFASIPVSNSISRLGEENLPGLSISVAAEPMDSKMIQDLSKNTLGKGQNCLDIDGIMGNPRKLSKILRTEYGWDSLASRNVWSFYNGNVLINDTLPDEISPELLSKYKEQIIQGFYWTVKEGPLAEEPIYGVQYKLLSISVPSDVNIDVMKSQIIPLMKKACYVGLLTAIPILLEPIYEVDITVHAPLLPIVEELMKKRRGSRIYKTIKVAGTPLLEVRGQVPVIESAGFETDLRLSTNGLGMCQLYFWHKIWRKVPGDVLDKDAFIPKLKPAPINSLSRDFVMKTRRRKGISTGGFMSNDGPTLEKYISAELYAQLRENGLV

SEQ ID NO: 676 - protein, 236 aa, Saccharomyces cerevisiae; identical to SEQ ID NO: 220
  source 1..236: note = SBI05473_Ribosome assembly factor mrt4

SEQ ID NO: 677 - protein, 896 aa, Saccharomyces cerevisiae
  source 1..896: note = SBI05473_WD40-repeat-containing domain
MTQSLGIEQYKLSVVSGGKPALNNLSSVTGNKNIARLSQDQRNYIIPFNNQIKVYSVETRQCVKTLKFANNSLLSGIFLQEEENNESIVKILLGDITVPQQEDAHLITVFTNNGHVIVLNYKGKLVESPKHFKISLADEKLANVFHSEGNYRILTTFKDPSQKAHNSLQSYRLYALTFDDAKKQFEVAHQAEWHNVILSNISSNGKLLAHMCKDVSTKDHEHKSISVLSLFDDSVNLSFPLGSILSSQTQSLSSNTRYVSSMAIDNMGQQLAVGFASGVISIVSLADLQIRLLKWHIDSVLSLSFSHDGSYLLSGGWEKVMSLWQLETNSQQFLPRLNGIIIDCQVLGPQGNYYSLILQMTENNSNSDYQFLLLNASDLTSKLSINGPLPVFNSTIKHIQQPISAMNTKNSNSITSLNHSKKKQSRKLIKSRRQDFTTNVEINPINKNLYFPHISAVQIFDFYKNEQVNYQYLTSGVNNSMGKVRFELNLQDPIITDLKFTKDGQWMITYEIEYPPNDLLSSKDLTHILKFWTKNDNETNWNLKTKVINPHGISVPITKILPSPRSVNNSQGCLTADNNGGLKFWSFDSHESNWCLKKISLPNFNHFSNSVSLAWSQDGSLIFHGFDDKLQILDFDTFKKFESLENTKTVSEFTLDSEIQTVKLINDTNLIVATRTTLNAINLLRGQVINSFDLYPFVNGVYKNGHMDRLITCDERTGNIALVINQQLTDLDGVPTINYKSRIIIFDSDLSTKLGNFTHHEYISWIGWNYDTDFIFLDIESTLGVVGTTVNTQLSDEVNNEGILDGLVSNTITTSASNSDIFAEQLHKLSSRGKKSDTRDKNTNDNDEDEEDIALEFINGEKKDKLVNMNSFTSMFDNIQNVQMDTFFDRVMKVLT

SEQ ID NO: 678 - protein, 588 aa, Saccharomyces cerevisiae
  source 1..588: note = SBI05473_Zinc finger C2H2-type
MKTCYYELLGVETHASDLELKKAYRKKALQYHPDKNPDNVEEATQKFAVIRAAYEVLSDPQERAWYDSHKEQILNDTPPSTDDYYDYEVDATVTGVTTDELLLFFNSALYTKIDNSAAGIYQIAGKIFAKLAKDEILSGKRLGKFSEYQDDVFEQDINSIGYLKACDNFINKTDKLLYPLFGYSPTDYEYLKHFYKTWSAFNTLKSFSWKDEYMYSKNYDRRTKREVNRRNEKARQQARNEYNKTVKRFVVFIKKLDKRMKEGAKIAEEQRKLKEQQRKNELNNRRKFGNDNNDEEKFHLQSWQTVKEENWDELEKVYDNFGEFENSKNDKEGEVLIYECFICNKTFKSEKQLKNHINTKLHKKNMEEIRKEMEEENITLGLDNLSDLEKFDSADESVKEKEDIDLQALQAELAEIERKLAESSSEDESEDDNLNIEMDIEVEDVSSDENVHVNTKNKKKRKKKKKAKVDTETEESESFDDTKDKRSNELDDLLASLGDKGLQTDDDEDWSTKAKKKKGKQPKKNSKSTKSTPSLSTLPSSMSPTSAIEVCTTCGESFDSRNKLFNHVKIAGHAAVKNVVKRKKVKTK

SEQ ID NO: 679 - protein, 546 aa, Saccharomyces cerevisiae
  source 1..546: note = SBI05473_Zinc finger, RING/FYVE/PHD-type
RRKQLAIFVVVTYLLTFYCVYSATKTSVSFLQVTLKLNEGFNLMVLSIFILLNSTLLWQLLTKLLFGELRLIEHEHIFERLPFTIINTLFMSSLFHERYFFTVAFFGLLLLYLKVFHWILKDRLEALLQSINDSTTMKTLIFSRFSFNLVLLAVVDYQIITRCISSIYTNQKSDIESTSLYLIQVMEFTMLLIDLLNLFLQTCLNFWEFYRSQQSLSNENNHIVHGDPTDENTVESDQSQPVLNDDDDDDDDDRQFTGLEGKFMYEKAIDVFTRFLKTALHLSMLIPFRMPMMLLKDVVWDILALYQSGTSLWKIWRNNKQLDDTLVTVTVEQLQNSANDDNICIICMDELIHSPNQQTWKNKNKKPKRLPCGHILHLSCLKNWMERSQTCPICRLPVFDEKGNVVQTTFTSNSDITTQTTVTDSTGIATDQQGFANEVDLLPTRTTSPDIRIVPTQNIDTLAMRTTSTSTPSPTWYTFPLHKTGDNSVGSSRSAYEFLITNSDEKENGIPVKLTIENHEVNSLHGDGGEQIAKKIVIPDKFIQHI

SEQ ID NO: 680 - protein, 399 aa, Streptococcus thermophilus
  source 1..399: note = SBI05579_ Phosphoglycerate kinase
MAKLTVKDVELKGKKVLVRVDFNVPVKDGVITNDNRITAALPTIKYILEQGGRAILFSHLGRVKEEADKEGKSLAPVAADLAAKLGQDVKFIPGVTRGAELEAAVNALEDGQVLLVENTRFEDVDGKKESKNDPELGKYWASLGDGIFVNDAFGTAHRAHASNVGISANVEKAVAGFLLENEIAYIQEAVENPERPFVAILGGSKVSDKIGVIENLLEKADKVLIGGGMTYTFFKAQGIEIGNSLVEEDKLDVAKALLEKSNGKLILPVDSKEANAFADYTEVKYTEGEAIDPGFLGLDIGPKSIAKFDEALTGAKTVVWNGPMGVFENPDFQAGTIGVMDAIVKQPGVKSIIGGGDSAAAAINLGYADKFSWISTGGGASMELLEGKELPGLAALTEK

SEQ ID NO: 681 - protein, 132 aa, Streptococcus thermophilus
  source 1..132: note = SBI05579_30S ribosomal protein S8
MVMTDPIADFLTRIRNANQAKHEVLEVPASNIKKGIAEILKREGFVKNVEVIEDDKQGIIRVFLKYGQNGERVITNLKRISKPGLRVYSKREDIPKVLNGLGIAIISTSEGLLTDKEARQKNVGGEVIAYVW

SEQ ID NO: 682 - protein, 167 aa, Streptococcus thermophilus
  source 1..167: note = SBI05579_50S ribosomal protein L10
MSEAIIAKKAEQVAIVADKMKAAASIVVVDSRGLTVDQDTVLRRNLRESGVEFKVIKNSILSRAAEKAGLEDLKKLFVGPSAVAFSNEDVIAPAKVISEFAKGAEALEIKGGVVDGAITSVEEINALASLPNKEGMLSMLLSVLQAPVRNVAYAVKAVAESKEDGAA

SEQ ID NO: 683 - protein, 98 aa, Streptococcus thermophilus
  source 1..98: note = SBI05579_50S ribosomal protein L23
MNLYDVIKKPVITEKSMIALEAGKYTFEVDTRAHKLLIKQAVEAAFEGVKVASVNTVTVKPKQKRVGRYTGFTSKTKKAIITLTADSKAIELFAAEAE

SEQ ID NO: 684 - protein, 563 aa, Streptococcus thermophilus
  source 1..563: note = SBI05579_Arginine--tRNA ligase
MNTKELIAAEIAKVVPELEQENIQNLLETPKNADMGDLAFPAFSLAKVLRKAPQMIAADIAEKIDASNFEKVEAVGPYINIFLDKSKISADVLGQVIAQGSHYADQNIGNGRNIAFDMSSPNIAKPFSIGHLRSTVIADALANIVAKQGYKPVRINHLGDWGKQFGMLIVAYKKWGSEEAVKANPINELLQLYVRINAEAEEDPSVDEEAREWFRKLEAGDEEATALWQWFRDESLVEFNRLYDELGVSFDSYNGEAFYNDKMDEVVDILTEKGLLQESQGAQVVNLEKYGIEHPALIKKSDGATLYITRDLAAALYRKRTYDFAKAIYVVGNEQSAHFKQLKAVLKEMGYNWSDDMTHVAFGLVTKNGKKLSTRKGNVILLEPTIAEAVNRAQAQIEAKNPNLPNKEAIAHAVGVGAIKFYDLKTDRMNGYDFDLDAMVSFEGETGPYVQYAHARIQSILRKADFTPSADATYSLNDVESWEIIKLLQDFPRIINRASDNFEPSIVAKFAISLAQAFNKYYAHTRILDESPERDSRLALCYATATVLKEALRLLGVEAPDEM

SEQ ID NO: 685 - protein, 203 aa, Streptococcus thermophilus
  source 1..203: note = SBI05579_Protein GrpE
MTEDIKEEVKEEEATETTEEVVEETKEATETTEEVVEGTKEATETTEEVVEETKETSELEEAQARAEEFENKYLRVHAEMQNIQRRAKEERQQLQKYRSQDLAKAILPSLDNIERALAVEGLTDDVKKGLEMIQESLINGLKEEGIEEIAADGEFDHNFHMAIQTMPADDEHPADTIAQVFQKGYKLHDRILRPAMVVVYKEN

SEQ ID NO: 686 - protein, 391 aa, Streptococcus thermophilus
  source 1..391: note = SBI05579_protein NusA
MLEAFRVLEEEKHINKEDIIDAVVESLKSAYKRRYGQSESAVVEFNEKTGDFQVFTVREVVDEVFDSRLEISLKDALAISSAYELGDKIRFEESVDEFGRVAAQSAKQTIMEKMRKQMREITYNEYKQHEGEIMQGTVERFDQRFIYVNLGTLEAQLSRQDQIPGESFKSHDVIDVYVYKVENNPKGVNVFVSRSHPEFIKRIMEQEIPEVFDGTVEIMSVSREAGDRTKVAVRSHNPNVDAIGTIVGRGGSNIKKVVSRFHPTRLDAKTGIEVPVEENIDVIQWVEDPAEFIYNAIAPAEVDYVLFDEDDSKRATVVVPDNKLSLAIGRRGQNVRLAAHLTGYRIDIKSASEYEALEAEKAEAEVDEVVEEIVAEATPVDVTTEEAPEAE

SEQ ID NO: 687 - protein, 400 aa, Lactobacillus plantarum; identical to SEQ ID NO: 186
  source 1..400: note = SBI05697_ Phosphoglycerate kinase

SEQ ID NO: 688 - protein, 131 aa, Lactobacillus plantarum; identical to SEQ ID NO: 187
  source 1..131: note = SBI05697_30S ribosomal protein S8

SEQ ID NO: 689 - protein, 167 aa, Lactobacillus plantarum; identical to SEQ ID NO: 188
  source 1..167: note = SBI05697_50S ribosomal protein L10

SEQ ID NO: 690 - protein, 97 aa, Lactobacillus plantarum; identical to SEQ ID NO: 189
  source 1..97: note = SBI05697_50S ribosomal protein L23

SEQ ID NO: 691 - protein, 562 aa, Lactobacillus plantarum
  source 1..562: note = SBI05697_Arginine--tRNA ligase
MDYKQLVAAALAPALPDLTQEAILDKIEQPKTSKQGDLAFPTFTLAKTLHKAPQMIASDIVEKVDSSDFEKVVAMGPYVNFFFKKDAFAADILNQVLSNGGHFGDAKLGEAGQVPIDMSSPNIAKPISMGHLRSTVIGNSLANILSKLDYQPVKINHLGDWGTQFGKLITAYKMWGSEAEVKADPINNLLKYYVRFHKEDVDHPEMDDEAREWFKKLENGDEEATHLWSWFRSESLKAFKKIYQRLDIDFDSFKGEAFYNDKMQEVVDILEDKHLLQESQGAEVVDLSKYDLNPALIKKSDGATLYITRDLAAAIYRKRTYDFVQSLYVVGNEQTNHFKQLKAVLTEMGFDWADQIHHIPFGLITSGGKKLSTRSGRVILLDKVLDDAVALAHEQIEAKNPDLPNKDEVADAVGIGAVVFHDLKNERMNSFDFNLEEVVRFEGETGPYVQYAHARAESILRKAGSPEIAATEQTLSDPAAWDTLKLLSEFPATVVRASTEYEPSVIAKYAIHLAKAYNKYYANTKILVEDDELNARLALVKSVSIVLKEALRLLGVKAPDEM

SEQ ID NO: 692 - protein, 202 aa, Lactobacillus plantarum
  source 1..202: note = SBI05697_Protein GrpE
MKTLAKKSTRTTPEDSQASTTDSAATSTASEATQAATSATDDQAEQTTAVDPTQQITDLKAQLDAKDDQLLRAQAEIVNMQNRNKKEQAALLKYDGQALAKDVLPVLDNLERALATPADDEAAQQLKKGVEMVYGHLQDALKKHGVTEVAAAGEKFDPNIHQAVQTVPVDDDHPADTVVQVLQRGYLLKDRTLRPAMVVVAQ

SEQ ID NO: 693 - protein, 405 aa, Lactobacillus plantarum
  source 1..405: note = SBI05697_protein NusA
MSKELLGALDTLESEKGIKKEVVIEALEAALVSAYKRNYGQAQNVEVDFDQIKGNIHVYAVKEVVEDVFDSRLEVSLQDALAINRAYEIGDDIRFEVTPKNFGRIAAQTAKQVIMQRVREAERGIIYDEYSQYENEIVTGEVERQDNRFVYVSLGKVEAVMGRSDQLPGEVYRIHDKIKVYVSKVENATKGPQVFVSRTAPDLLKRLFEQEVPEIFDGIVEIVSIAREAGDRAKVAVRSNNPNVDPVGTCVGPKGQRVQTIVNELHGENMDIVEWTDDQAVFIANALNPAEVLDVIFDPENERGCTVVVPDYQLSLAIGKRGQNARLAAKLTGFKIDIKSETEASDIMDANPDDVAAAETETTEAASDAAVQSDTGEDEEPATSDAAVATPASETAVDESASDAE

SEQ ID NO: 694 - protein, 250 aa, Pichia terricola
  source 1..250: note = SBS00208_Exoribonuclease, phosphorolytic domain 1
MSRFELFSPEGLRVDGRRFNELRSFNCSTNTHQHSSDGSAYLSQGNSKVLCLVRGPSDTLMTMASSNTGNSSSSTEPTISVSIIQPPYATMDRKQRLRNDRRLSELAIILKRAFQQTIVKKKYARTTIEISITVLQLDGSILPACVNAATLALIDAGIEMYDYISACNVALYDTFPLLDTNSLEENDLSFLTVGIVGDGDKINLLLMENKIPMDKLQKMIDLGIQGCHRIRELMDEAVRNIGTDLLLKNQ

SEQ ID NO: 695 - protein, 670 aa, Pichia terricola
  source 1..670: note = SBS00208_Heat shock protein 70 family
FKKSSSLISTTSFLLCAVLLVLLPFVSNNFVEADSENYGTVIGIDLGTTYSCVGVMKNGRVEILANDQGNRITPSYVAFTENNERLVGDAAKNQAASNPYNTVFDIKRLIGQRFSDKIIQKEIKHLPYKIVDKDDRPIVEVEYSDETKNFTAEEISAMILGKMKSIAEDYLGKKVTHAVVTVPAYFNDAQRQATKDAGTIAGLTVLRIVNEPTAAAIAYGLDKGEEEKQIIVYDLGGGTFDVSLLSIAGGAFEVLATSGDTHLGGEDFDYRVVRHFIKIFKKKHDIDISENARALAKLKREVEKAKRTLSSQMTTRIEIDSFVDGIDFSEPLTRAKFEELNMELFKKTLKPVKQVLDDAKVKASEIDDIVLVGGSTRIPKVQELLEKFFNGKKISKGINPDEAVAYGAAVQAGVLSGEEGVEDIVLIDVNPLTLGIETTGGVMTTLIKRNTPIPTKKSQIFSTAVDNQNAVLIQIYEGERAMVKDNNLLGQFELSGIPPAPRGTPQIEVTFTLDSNGILKVSAMDKGTGKSNSVTISNDKSRLTQEEIDRMVEEGEKYAEQDEELRKTIVAKNELENQAHNIKNQINDEDGWGAKLDQEDKETLLEAVEEAISFVEENGETASVDEFEEEKDKLMKVVNPIVSKLYADSSDFGADDDEYDDEDDWDHDEL

SEQ ID NO: 696 - protein, 375 aa, Pichia terricola
  source 1..375: note = SBS00208_NADPH-sulfite reductase
RYLSTQTPKIAVIGSGPSSFYTTLKLLEHNSNLRIDMFEKNPSPFGLVRYGVAPDHPEVKNCIDRFNEIENFSDRFKYYGNVNVGKDITLSDISKNYNKVLPGVINSFDFVGWYNGFDQFRDLNVPLNKVKNVIIIGNGNVSIDIARLLLSGSERWENTDIYDGALEALKTSTVEKVTIVGRRGVLESKFTNKEFRELLELPDSCLEGWHEERFADQLKDVKLGRIEKRRVSLLERHSNDDCGSIDNARKWELKYLLEPIGIKVKDDQFIEDVIFKENELVKWGIQSKGKITSIKGDLVIFATGYECEPLAEFQDLNIAFNEQRSLIENDDGKIRNCQNFYVVGWLKTGATGNINSTVLDSSIVAGTILKDLEEE

SEQ ID NO: 697 - protein, 713 aa, Pichia terricola
  source 1..713: note = SBS00208_p-loop containing nucleoside triphosphate hydrolase protein
ASMFLNSLLNQSKKGSLLKPKLDVVRDKQFTLSSGKRLVLKPKTESTKEKEKDIVENLPWNLKNRNGDFECLDMNKLYAQLRIEEINDLQLKKYQKEQESLKTSLNKLDLIVKDTDGLPKKKNKKNVQVNSLWTEKKTSITQCVCKQLGYEIHEINSSDERSGSVVKEKVKNSLKMRSLSGKNVCLVLDEIDGAVGNEHGFIKVLIHLLNKDIKVTEEWKNYNKLKYNKNDDFLKRPIIAMCNDINAHCLDQLKPYCEIVQFKKTTNKSIKKRLKSILEIEKVSEVNESLLDDLIISLDGDIRNCINFLQFNSRSLNGKIKDTEINWFQILKDIFNLENKNVKNKKSKTDIFRELSAKLNNSTNDLNKINNGCFNLMLQATSDDDRTTLKKLNEVSDWLYFQDRLSRSFSSFEKDEIKLYGSITPLKFFSLFANFSDNYHNSNDRFNFKSQENFDRKRLVTDLLNSLLREYSFKINRNELVVNEIFMLNNIVVPHNLNIKQFELQQTKIERIAAILKELHIGIESYPVNNKIKFRTSYDNFIKFKPNLVSGLMDAKHKVPVLDSATKEPYKPYKDSETEESDLNEIKSMPFLKVLHQQLKKEHLMSKAAKRVRDEINDGDDENSSGFTLSAGSTKRQQTEDRKPVSTVDFFKQYADFKNQLHAAKSGSSATTGNNGSSEPSGSVMRQNENRIWVKYHEGFSNAVRKEMTWNEL

SEQ ID NO: 698 - protein, 721 aa, Pichia terricola
  source 1..721: note = SBS00208_PAN2-PAN3 deadenylation complex subunit PAN3
STSQYDWAKNIPCRNIQIHGFCKFEHKGCSYNHDAAVQKLASSAPETSTVTGQTSSESQTLNPPKSPASAISTPLALSSSNSSKIPIFKPSNLLNKSPKGIDNSAPLSTTTNISSPVLSGKKFNVDSPAFTPTPLNKTFSPSLDSIPTFIPNANISIDNINTIPTETDNHANGTDPNNAHSTSPNSAFTDLASSLRSSLGKTESFSVINAPSFTPNISSPFQSKQSSQQLSSLMGLSQHPSSQLQSHSQQPVLPPPTEEEMFYQNTNLYPVNFLLYAPPPPPHVELNKKPNERTVDDLFINNKLREYLQLKNEESLKSISNNELDLPLHVGPYHSLYPIDHNYDYNTKSFGYVSSIYKCMSNTDGKLYAMRRLQNVPITSPSVLKSVKQWKKLNCANCVKIYDVFTTRAFNDNSLILIYDYYPMSLTLIENHFRKNPDLITEDSLWNYTIQLLNAIAEINKLNLSIGSIDPSKVIITNKGRIRLSALSINDILKDLELKKTRDNAKSTNNFIPDQDTTISSESDASTKNDSDLLNLGKLILFLAKSSNFIKNQSSDPFEIISQLKFTNVFKKMLGYLFNEDATIEKFQELVAPMILKLTNGLQNSCDQMESTLMGELENARLVRLFAKLDFVSERPEDGSWSETGERYPIKLFKDYVFHQVDDSGKPVVDLTHVIDCLNKLDAGVEENILLVSPDEITCLIMSYKDLKDLVNKSFLKLLGK

SEQ ID NO: 699 - protein, 985 aa, Pichia terricola
  source 1..985: note = SBS00208_Ribosomal protein S5 domain 2-type fold
DAMQFDEFGNPINGFSSDSESDSETEELLKKDIDLDGELEQRDHEGDTEMKDIVLSEDKTYYPSLSETFGPEVETIIASSDAKSLHEPIVTPQVEKKFMLEERSLPETTYSKAYLWEMSRVTDRVRNVALVGNLHSGKTSILDMLITQTHNFSQNKDPNDDKPLRYTDNHILESKRGISIKSTTMSLLLPDLRDANMMVNVIDAPGHTNFVDEMSVAVRMADIAFLCVDVVESVTESLELAIEYSLKTNTKMMLLITKIDRLILELRLPPLEAYYKIRSTIDEVNKAISTKCKALRIDGVDMKLSPELNNVLFSSSVFSMIFSLTSFTHTYFQANELDKNPKVSVDSFARKLWGDVYYENKKFFVRPKNLIESANSRTFIKFILAPIYKLTTASISLDADDLQAFVESKMRLRIHRSKYKLDTKVFFKELFKAFLGEPSKAFVHLLSHHPSPADHSVSKLNYLYTGLKESDIADHITRCDPEGPLIAYVSKLVDTKDGENFYAFVRILSGSLKSNSTVKLLGEDYSVDNTNDFKDQKINKCYLWCGRYKASVPELNAGSIGLVAGPGIDQFIVKTATIYDLKLPQDSLHIIKKSDELISPVYKVSLQSYNPKDLNRFLDSLKKINRSYLGCDIKIEDNGENSILGYGELYMDCLLHDLRILYGNNLDIKVSDPMVKFHETTDSISRVKLTIHSSNGKNSISIISEPLDAELSKDIANGLLNVKYESPRTIAKKLRNIYGWNSLSARSVWSLGPNQENGTCLLCNDTISEEVDTTLLHEYKDVILKGFQWAVKEGPLCEEPINNVRFKIIDINFADEEIDRNKGQIIQMVRNACHAAILIGEPSLLEPIYKIELLINTIEILDTIKKVIEKRRGFITDEIRIDGSPMWKIVGFLPVIESVGLEVDIRLFTRGLAYPQLIFHKWEIVPGNPLDPNVFLPNLKRVPLQSIGRDFMLKTRRRKGLSDEVTLEKYVDSDTWMMIKELDIL

SEQ ID NO: 700 - protein, 223 aa, Pichia terricola
  source 1..223: note = SBS00208_Ribosome assembly factor mrt4
MPRSKRSKLVTLAQTDRKGKENKIRIFDEVRSALDEFRFVWVIRLDDVRTLQDIRSDWTGSKLLMGKRKVLEKALGEKPEDEYKDNLHKLSKACTGVSGLLFTDETPETVKAYFSAYSKQDYSRAKTKAPIDFVIPEGIVYSRGGQIPIEEDVMSHSVEETLRNKLKVPTRIKSGKITLSEPYVVCRKGDTLDVRQALLLKQFGVAASEFKPELVAYFDSEDS

SEQ ID NO: 701 - protein, 837 aa, Pichia terricola
  source 1..837: note = SBS00208_WD40-repeat-containing domain
SSIENYSVSLVSGGKLQTPFIYNHNDIEYTSKYDLLNNSFNFYTDSDRDYSIIPFNNMIRLYCINTRQCMKTIKFNNNKVLEQIFLNSSFVENTIIYSNVINIDQINFIELVSKNGKIVYVPLDRRIDYDTDIKALDIEFINNDNKNLLITQVLNDNIVLLEDDSKSNFYIGTRINEEDSVKIVIKKTIAKEQLITYSWSNNKSNLLIIKKSENDIKRQKESKKSKKNNSQATYNTVDCSIFTTNQIDIEEPILNFTDIEINTSDSISKNSKIITQSTISNDLSKLAIGFASGVIQLISLSQADSTTTTQFLKWHCDSVLSLSFNSNSTQLFSGGWEKVFVYWDLSQGSIKKNFIPRLNGVIVSIVEPDFKENYISVLLQHVDNLTNMDLEFLLLNKSDFKSKLSVNGPLINFESDYLIKNLKGENIRPRSAIKQKTSTNANGYNNDITIRSFTNSISSPEILYFPHCNGINTYDLNKNESLKYIQLSKSVEIGKIRNEHEDIIEPEILKIENFQIEHNNIKYEFLITLESLKSQQNSVFANTQKKANNEISYTLKFWKKSINTESNDWILQTKIISPHGVENNQLLGDIEIVDIHISSTNSNSHLNKHIFTTDKYGGVKKWAVLEIPNNVIDENLCWKFGLINYKSSNNNLITENNFVIESLDKSLVLQSLGDRLYFLDAINMNSILKFLQLDSNIQTMQLNKVNGNIVIMTKIGLLTYDLIKNEITNGFDMYDEFKKSLISQDSTTSNTNKSLVLKNGLELKNMKRLISINPLTGDITLVVNNILSRKSMIYFFDKDLNNIILKKEHDSWISCMKWNNFNNFNFIDINSRIGIIS

SEQ ID NO: 702 - protein, 375 aa, Pichia terricola
  source 1..375: note = SBS00208_Zinc finger C2H2-type
MKTGYYELLEVSETATDADLKRAYRKKALQLHPDKNPDDIEGATQRFALVRAAYEVLSDPQERSWYDSHKNQILRDDDDYGAEDEAIPPIPSISVEELMRYFNPALYTIIDDSLSGFYNVTERLFERLAAEEIRHARLQGLKEYESFKDDAPNVNVIDSSMLKFPRFGNSASDYTTQVRRFYSEWSSFQTVKSFAWKDSYRYSSAPDRRTKRLMEKENKKIRDSARKEYNETVRSYVQFIKKRDPRVKSGISEFEKQRKKKHQEELERQVKEQRNRELREMARAKFDVQDWQKLDLDELEEVERILEEDFKSSSDSEFDEFAPPEDDDYYDCVVCNKQFKTKRQFEMHELSNKHKKAVKRLKWSMRKEGIELGID

SEQ ID NO: 703 - protein, 349 aa, Pichia terricola
  source 1..349: note = SBS00208_Zinc finger, RING/FYVE/PHD-type
LLSYVTISTMASAYNLMKLYERTPNFYVFGTLLPSNSLTLFLCTNAVVSWTILIGVILQHLVFGELRIIEVEHLYEKSWRSIMTLVVTGFTHMNTKNSIFLIIFGCLLLFLKAFHCLLSDRLDGIIQRYHSNTSEESGKFKNVVFNRILLCSSLIIRFDYMIIKWCIDESLMNKRYILLFIAFELFFETMQLINSLIKFGCNAWEIQYLMKHEDEDNWRFKVWIETISKFVINLITCASIGLMFTVFLMKGQVYFQLMTTSFYSVYDTFQSFHKIITLIRSQYKLKSILFTPTAEEIENADICIICRDDLVSGDNSKAIKLACGHILHENCVKSWLTMSKLCPTCRKDV

SEQ ID NO: 704 - protein, 242 aa, Debaryomyces fabryi
  source 1..242: note = SBS00319_Exoribonuclease, phosphorolytic domain 1
MSRMELYSPEGLRIDGRRWNELRRFECRINTHPSSSDGSSYIEQGNTKIICMVQGPMEPSLKSQTNSSKASIEINLSIANFSTIERKKRLKNEKRLIELKTTLERTFEQSVICKLYPRTVIQINLHVLCQDGGLLAGMTNAITLALIDAGVAMYDYVSAISAGLYDQTPLLDLNTLEENDMSCLTIGVVGKSEKLALLLLEDKMPLDLLESVLAIGIAGGHRVRDLMDNEVRKHGNIRSSRL

SEQ ID NO: 705 - protein, 682 aa, Debaryomyces fabryi
  source 1..682: note = SBS00319_Heat shock protein 70 family
MLKVNSRFWISGFTLAYVLLAVILPLLTPNQGQALAAAGEDNDTESYGTVIGIDLGTTYSCVGVMKNGKVEILANDQGNRITPSYVAFTPEERLIGDAAKNQASSNVENTVFDIKRLIGLKYNDKTVQKEIKHLPYKIDKKDGKPVVKVEFNNEAKTFSPEEISGMILTKMKSIAEEYMGKKITHAVVTVPAYFNDAQRQATKDAGTIAGLNVLRIVNEPTAAAIAYGLDKTEGEKQIIVYDLGGGTFDVSLLSIEGGVFEVLATAGDTHLGGEDFDFKVVRYLTKVFKKKHNIDISGNSKAISKLKRETEKAKRTLSSQMSTRIEIDSFVDGIDFSETLSRAKFEELNIDAFKKTLKPVEQVLKDASVKKADIDDIVLVGGSTRIPKVQELLEKFFDGKKASKGINPDEAVAYGAAVQAGVLSGEEGVNDIVLLDVNPLTLGIETTGGVMTTLINRNTAIPTKKSQIFSTAADNQPTVLIQVFEGERALAKDNNKLGKFELTGIPPAPRGVPQIEVTFSLDANGILKVEAMDKGTGKSESITITNDKGRLSKEDIDRMVEEAEKYAQQDSELKAKIESRNSLENYAHMLKGQVKDESENGLGSKLDDDDKETLDDAIKETLEFIEDNYDSATSEEFEEQKQKLIDVASPITSKLYGGGAGGADEAQFGDDDSDDEFVHDEL

SEQ ID NO: 706 - protein, 507 aa, Debaryomyces fabryi
  source 1..507: note = SBS00319_NADPH-sulfite reductase
RYFSVSIRNFEKNIPTYKVAIVGTGPAGFYTAHHLLHKAAPLDQFKLKVDLFERLPAPYGLSRYGVAPDHPEVKNCEDYLNNIMQDYPAKKDNNTENKNHEVRFFGNINIGTDITLKDLESNYHSIILSYGCTSDDNLLNIPGAQLPGVISAREFVHWYNGHPDYHSADTEFIPPQLNKIEDVTIIGNGNVALDVARILLAEPEKHWATTDISKEALDALFKSNVKNVNIVARRGILESAFSNKEIRELLELSKNQKVRFLPIEDSIMKHIQPMVKNLGRIDKRRVALLEKYSKQSLDVDDSMKTWSLKYLRSPIEFTANENSPNLLSSTIFQKNELIHDLLTNKIQIKPITGEIETIKNELVILSIGYKGSPLVGFEEAEISFDTRHNRLLNKEGRILSTSASGEDLHNLVYKKGWYTSGWIKNGPKGVIATTMMESFETADNVLEDLSNGIHTNPLPNSTLLEKRLKAKPAVSWDDWLKLEQLELNNGSKLGKSRDKLSNTTEML

SEQ ID NO: 707 - protein, 744 aa, Debaryomyces fabryi
  source 1..744: note = SBS00319_p-loop containing nucleoside triphosphate hydrolase protein
KDVKFFDGSYIALKKKSKPKKRIDLASLGIEETDSIVNMEELFKKISIKKSLKNNHEKSKSTSNRRKKLQQNQVWTEKYRPSSFMHLCSAGNDKQYRLILHWLKKWSHVVFGEASSLNDNVDSLGRPHKKFLLINGPLGIGKTSAAQILARQLGYNVQELNASNSMDSLPQSTAAGTSYTNATVALKLKIMNALTTNSLTSNGKPTCLVIDEIDSSINSNEIIKVLNELSYSDQRASQRNFKNDGISINASSERKSNKNKKDFMFNRPIICIANDIYSTGNSFRNSGGSPMDKLRPLCEIVTMRKPSSTKSVSGVKRSGNASRSVKEHLMWINEREKLGMDYQQLSEVVEVCEGDIRACINYLQFNARKVDLPTVPSFSRDISKYNKDSHISWFAMVDLLFKRDPQLSKDENFMALMDVVMNGDGKSTSSNHSSLDKVIRGCFNKYLDVVHVQDDSLHKPSELSDWLSFYDLMGNSNEIDYSSSLVSMKIWSLFSELNLNKFSNENSLLPNSKNLEFEAYELMKQNKSIIKRVMNKLPIALKQTVGGGGGELNHTFACYFLPYLNKILTPDTSESKLKSNLRNFEKHLVEKAAILIRDIDLHLEKHRDFETGQESLQISPSWDTITNFETYFLPIPASALSKQIQIKRQWLFPLIQSELERLDMLRKSHKRSYESSSSKQKEETESKKKKNRLNSLEFFKGRYDVVASQINESDSNHELTRIWVKYNEGFSNAVRKNIGWNDIW

SEQ ID NO: 708 - protein, 658 aa, Debaryomyces fabryi
  source 1..658: note = SBS00319_PAN2-PAN3 deadenylation complex subunit PAN3
MNINLDSAKDTFCKNVLIYGYCKYENKGCAFSHTVKPNSSVPGSQGSNATTNSSGNTNAEMKKKFNFNTPSFQPSNVQNLTNKFSNLSPNLKEIPVFVPSGGMSNTDSGGINEAEMNELATPSKKFNASTPSFMPSNPYITTNDQISAPSPVIAQSVTTPGAKTNGNIQHNPYLQGNSGTPQPTSAVAAPNSADVFFQQPTSYPLQYHLYAPAPPPRLTIPLPPHEINVNLMFIPNDLRETLLKRNEATLQTLPRSNLPDHVNIYHSLVPIDTSFENISKVYGLPSFVYKVFSNVDGNPYALRKIDIQSVLRITNELPFKHIKKWKSVKCANIVQLQEAFTSMAFGGSYSSLIVTYDYFPNSNTLQEQHINRRLGGKLEPITEELLWNYVIEITNALINIHENNLAARSALDLSKILVTNKNRIRLGGVGISDILNYEDDEEQINQKGLEAFRHELQLEDIKKFGKLILDLAALCLPNSARNNEPKDLISLLKSSNIVNFSDEFISLLSDLNSNTTDLHEFNRNHLSRKILNFCSNLQDLQDFMESQLSTELENARVFRLITKLNFIIDRPEYENDPNWQENGNKYIIKLFRDYIFFQYDEFGKPVCDLSRVLTNLNKLDAGIDEKFLLVNRDEKSCIIVSYKEVRDIIDSAFRTLTR

SEQ ID NO: 709 - protein, 982 aa, Debaryomyces fabryi
  source 1..982: note = SBS00319_Ribosomal protein S5 domain 2-type fold
EDELYDEFGNLIGDPLDSDADSLDEIPDEQYVQAENEADDSTTETGSEALVVHGSNGNGLKLADKFGPGVETIIAKPYEQTEDAPVIIPVNKKKLKVEFTEPVMNNVNEDDKRIKNLPELVYSRDYMISTMNLLPERVRNIAVIGNLHSGKTTFIDMLVLQTHSPSIFLSSSLKNFQPLRFMDNHKLEIARGISIEMSPITLLLPDLNEKSFIFNIIDTPGHSNFASESSSALQVVDGALLVIDVVEGLTPRDKSLISELMKNNTPITIVLNKIDRLILELRLPIEDFYFKINYTLDDINDFINENEYASIYGQQLIFSPAQGNVIFASSSLEFVFTLDSFTKLYSNNHKLQGIDTQEFSRRLWGDVFYNSDKSQFVNSSNNGKFPRSFNFFILEPIYKIITHTLTYDGSSGKLANLLWNNFKVTLHNSQYKQDSQMLLKAIFKLVFSGSKGFVDLVVRNIPSPTENVSDKLKLLSYSENTSSTTLIAQANKLIASANGERFYSLVRVYQGTIKTGSKVRVLGQNFEEDEDDFRIEVVDEIFVPGGRYKVPVKEAFAGSIVLVSGIDSIISKGATLYDYADSHKDFKIFRSLSYERQSIFKVAIEPANPSELPKLLEGLRKINKAYLACTIKVEESGEHILFGPGEIYLDCMLHDLRNFFTDDLEIKVSDPMTKFSETCSDTSAIKISTKSSSGNNSISIIAEPVNDNRLSEAIERGIINLSQPLKSTSKILRKEFGWDALSARSVWCFGPEDLHNPSILIDDTLEGETDKTLLYSLKDSINLGFKWSVNEGPLCDEPIRNTKFKILDAVISGSEIQRSGTQIIPMTRKACNTGLLTASPRLMEPIYTVYVTCSYHAITAVKKLLARRRGMVTNENPVPGTQLFHLEGQVPVIESIGLESDLRLHTQGQAMCFLVFEKWDVVPGDPLDSDCYLPPLRPVPNASLARDFVMKTRKRKGLSGEPNLQKYIDVELYNKLRESGII

SEQ ID NO: 710 - protein, 221 aa, Debaryomyces fabryi
  source 1..221: note = SBS00319_Ribosome assembly factor mrt4
MPRSKRSKLVTLAQTDKKGKENKTRIFDEVRSALDEFRYVWILQLDDVRTPVLQDIRTDWAGSKLILGKRRVLEKALGDTPEEEYKDNLHKLSKLCTGVSGLLFTSETPETVQAYFTAYSKQDYSRAKSKAPIDFTIPEGIVYSRGGQIPIEEDVPMSHSLEETLRNKLKVPTKIKAGKIILNEPYVVCTAGETLDVRKALLLKQFGVAASEFKVNTIAYF

SEQ ID NO: 711 - protein, 851 aa, Debaryomyces fabryi
  source 1..851: note = SBS00319_WD40-repeat-containing domain
SSDWSLNMASGGKPVSLPYSSASASVFSQDGRYDIVILSYQVRVYFVSTRQCVRTIDIDISDVADVKLDVLNSSHIVLFKSSGEIVTLNWKDKINEPVVSTINIAMEWPILSVASIRGDAYYVIIGKKDKKASPSPHTRHVVRISRDQFSVQNLIEINNVTRYAISSNSHKLAFLTSNHDIILVDLSFTSRQSDDDEEQIDYTELPQETIPFVYKSPVTSLAVSNDSVIAIGTSAGAIQLLYGGLTTDKPQGLLKWHIDQVRSLQFTPDNNYLLSGGMEKVLVFWQLETGKTQFLPRLNGSIERISLDNNKNDYYSLMLKVSSSGSDVVNDEDTYEILVLSAVDLVSRLSINSIRPKLAHNVKQTLLKTKKKFVKSESTFDKSKIKHDYTSIFEIHPKTKNLYFPNDAVIQAYDLIKNEQSFIQTAAPLLSTGKVRSENKLLDPIISLLSFTQDGQWMCTFDSISTSEVDNLLSKNDKQYALKFWKFIEASSKNDSNSTNSVNNKQGYWELSTKIIDPHGNSNPILSLTPAPLSYHQGLAFLTADNKGGLRIWRPRIPKEIYQTVKQGNNKLKQTAWTLRKSRPCGALVSDAIDTCWSDDGSVIILGHECSITTLNTQTFEEIPNDSFRVPALSGSRIRSLSILDDYLIVLSKTRITSFNLLSGESTDLVAKVNTTVGGRNLIAIDPIKKLICLGVNYYSNTGDSFAIKSKILVFKPDELTPLHVSYHSQGISSIRQYHSSFIFVDLDSRIGIISSTNETYESSNGSTQESDLASDMSNMLLNAQAAADVMTNRTVSFNRANGRHFSDDLETDDSVEINRAIDMNTFQPMFENLEGVQIETLFERIMKIIK

SEQ ID NO: 712 - protein, 602 aa, Debaryomyces fabryi
  source 1..602: note = SBS00319_Zinc finger C2H2-type
MKTCYYELLQVESTATDLELKKAYRKKALQLHPDKNPDDIEDATARFALVRAAYEVLSDPQERSWYDSHKSQILRDEDTFEVDENELVIPSISVEEIFRYFNPSFYTAVDDSQVGFYSVVSRLFERIAAEEISHAKHQGLSKYEKYHDDAPNVNVIEESMLLYPRFGNSKSDYTSHVRPFYNTWLSFQSVKAFNWKDEYRYSTAPDRRTRRLMERENKKARDAARKEYNETVRNLVAFIKKRDVRVKQGISEYEKQKKKKRQEELADQIRNNRQVELRKLATQNNFEIQDWQQLSIEELNELEQMLDEEYNSSSDSEFDEFEQTGDENYFECFVCNKYFKSEKHFETHEQSNKHKKVVNKLKWEMQKEGIELGIDKEDVDLDEFETASSGLESENDDNDINSGMSGNLSDASEAYHENIDNNTVKSLIIIDNSSNNIDDIGFEVDDEINSDFENDTEPIHMPQPSLKKKLKNKNKGKNKSIPVYSDNEDDELKRELSKLASNLNGVALDSDSDWSTNTKSKKNKKKKTPNPNSETASPKPQAAVPKKKKNNESDVLPTYVPKGSEICVVCKELFTSRNKLFQHVKSTGHAAPLTETKKGKKK

SEQ ID NO: 713 - protein, 537 aa, Debaryomyces fabryi
  source 1..537: note = SBS00319_Zinc finger, RING/FYVE/PHD-type
MIIDKSYQYFIGYISVSIALISWSVYTSLEISPNVFTFLIEFTDGYKLGILLNFLFLSFVLSGKFIQVLLFGHLRIIEVEHLVEKLPIYFINLLFNLTTNDNNLILNCLLLGIAVSFKIFHVILIDRLDYIHMKIFNNSSNERYTTYNILQKYLTSLYFWLILLFIISDFAIAKFLVYDVFQGINSVTCLLFGFQFAVQGVEALTYYSKLVLNIYELAFYRYQQDDFDIDEEDEEEEEDNERVWDNKAFFSKSIDICSASLKAISYLGFIYLLTIHSGLSLPISMLQGTYLSLKQTYKEISQLFAFIESSKKLDSQLPNATKEELESSDNLCIICREDMYALDEYERTHHKSLPARRYPKKLNCGHILHMGCLKDWLERSEICPLCRRKVFQAEENDLQQQTQGEAQPAAQPAAQPEAQPAAEAQPAAQPEVALQTQQAQPTGTNEGSRIRNADDEIQRNQNILNELNIPAEYPEPTITPPPTRTAEPSEVYQTIRLPTTAIIPQDWTILPLHRSTNGQYKVDFSTFNQGTLTIKQK

SEQ ID NO: 714 - protein, 400 aa, Pediococcus pentosaceus; identical to SEQ ID NO: 532
  source 1..400: note = SBS02335_ Phosphoglycerate kinase

SEQ ID NO: 715 - protein, 132 aa, Pediococcus pentosaceus; identical to SEQ ID NO: 533
  source 1..132: note = SBS02335_30S ribosomal protein S8

SEQ ID NO: 716 - protein, 168 aa, Pediococcus pentosaceus; identical to SEQ ID NO: 534
  source 1..168: note = SBS02335_50S ribosomal protein L10

SEQ ID NO: 717 - protein, 95 aa, Pediococcus pentosaceus; identical to SEQ ID NO: 535
  source 1..95: note = SBS02335_50S ribosomal protein L23

SEQ ID NO: 718 - protein, 562 aa, Pediococcus pentosaceus; identical to SEQ ID NO: 536
  source 1..562: note = SBS02335_Arginine--tRNA ligase

SEQ ID NO: 719 - protein, 190 aa, Pediococcus pentosaceus; identical to SEQ ID NO: 537
  source 1..190: note = SBS02335_Protein GrpE

SEQ ID NO: 720 - protein, 362 aa, Pediococcus pentosaceus; identical to SEQ ID NO: 538
  source 1..362: note = SBS02335_protein NusA

SEQ ID NO: 721 - protein, 400 aa, Lactobacillus brevis
  source 1..400: note = SBS04254_ Phosphoglycerate kinase
MAKLTVSDLDLKGKKVLMRVDFNVPIKDGVIGNDNRIVAALPTIKYVIEHGGKAILLSHLGRIKKEEDKPGLSMRPVAERLSNLLNKPVTFVPTTEGKQLEDAIDGLNDGDVLVMENTRYEDVKDGENVKRESGNDPELGKYWASLGDVFVNDAFGTAHRSHASNVGIASNMSQTAAGFLMEKEITFIGGAVDNPEHPFVAILGGAKVSDKIGVIDNLLAKADKILIGGGMTYTFYAAKGMKIGNSLVETDKIDLAKEILDKAGDKLVLPVDSVVAEKFDNDAPHKTVEGDVPDGYMALDIGPKSVAEFKDVLKDAKTVVWNGPMGVFEMSNYAEGTLEIGKFLGTLTNAKTIVGGGDSTAAVQQLGVADKLSHISTGGGASLEYLEGKTLPGIAAISDK

SEQ ID NO: 722 - protein, 132 aa, Lactobacillus brevis
  source 1..132: note = SBS04254_30S ribosomal protein S8
MSMTDPIADFLTRIRNANMVRHESLEVPASKIKRDIAEILKREGFIRNVEYIDDDKQGIIRVFLKYGKDNQRVISGLKRISKPGLRSYVKADAVPKVLNGLGIAIISTSEGVVTDKEARAKKIGGEVLAYVW

SEQ ID NO: 723 - protein, 168 aa, Lactobacillus brevis
  source 1..168: note = SBS04254_50S ribosomal protein L10
MSEKAIAVKAQHVEDVVEKFNNATSAIVVDYRGLTVEQVTDLRKQLREAGVQMNVIKNKILTRAAEKAGYGDLNDVFAGPTAVAFSNEDPIAPAKVLKKFADSVDALEIKGGYIEGNIVSIDEINVYATLPSREELLATLASQLQAPVRNVAYAIKAIVDKGDEGDAA

SEQ ID NO: 724 - protein, 95 aa, Lactobacillus brevis
  source 1..95: note = SBS04254_50S ribosomal protein L23
MESRDIILRPVVTEATMATMDDKRYTFDVDVRATKTQVKHAIEDIFDVKVVKVNVMNLKGKKKRQGRYEGYTKKRRKAIVSLSADSKEIKLFNEE

SEQ ID NO: 725 - protein, 563 aa, Lactobacillus brevis
  source 1..563: note = SBS04254_Arginine--tRNA ligase
MDYKQIVTAALSDALAGQLTRDEIASKLERPKTSDKGDMAFPTFTLAKLLHQAPQQIAQDLAEKLDKTSFEKVEVVGPYLNFFFDKGAYSAETLQTVLTAGADYGQNDDGQGGNVPIDMSSPNIAKPMSMGHLRSTVIGNSIAEILTKNGYHPIKDNHLGDWGTQFGKLITAYKLWGNEADVKADPINKLVEYYVRFHKEDVDKPELDDTAREWFRKLENGDEEAHELWQWFRDASLQEFNDVYEKLGVTFDTFNGEAFYNDKLEEVVQILKDKNLLVESQGAQVVDLSKYNLNPALILKSDGASLYITRDIATALYRDRTYHPAKNLYVVGSEQTYYFKQLKAVLQEMGVPSADDLEHIPFGLITVDGKKLSTRSGRIILLAKVLDDSVKLAAEEINEKNPDLANKDEVAQQVGVGAIVFGDLKNERTNNIDFVLADQLKFEGETGPYVQYSHARAESILRKAGKVTITTDGNQISDPEAWDTIKTLADFPAMVKMACDEFEPSVIAKYAIRLAKTFNKYYAHSKILTEDAELPARLALVKAVSTVLKESLRLLGVQAPDEM

SEQ ID NO: 726 - protein, 194 aa, Lactobacillus brevis
  source 1..194: note = SBS04254_Protein GrpE
MAEEQQPSTDDETAAKSATTKQASPKAETDQSATQPVEDQPTATPEEVAALEKKAADFEDKYLRAEAEVQNMQARFQKEQATLIKYDGQQLAKDVLPVIDNLERALAVEASDDVAAQIKKGVQMTYDHLEDALKRNHVTEIAALGQTFDPTLHQAVQSVPAEDGQTAETVVNVLQKGYQLKDRVLRPAMVVVAQ

SEQ ID NO: 727 - protein, 401 aa, Lactobacillus brevis
  source 1..401: note = SBS04254_protein NusA
MSKELLGALDVLETEKGIDKQVVIDALEAALVSAYKRNYDQAQNVEVEFDQRKGDIHVYAVKKVVDQVYDSRLEVGLDEALTINKGYELGDDIKFEVTPKNFGRIAAQTAKQVILQRVREAERNIIYNQYSQYENEIVTGEVERQDSRFVYVSLGKVEAVMGRQDQMPNETYRIHDRVKVYVTRVENATKGPQVFVSRTHADLLKRLFEQEVPEIYDGTVEIMAIAREAGDRAKVAVRSNNPDIDPVGTSVGPRGQRVQTIVNELGGENMDIVEWTDDEAKFIANALNPAEVLDVIFDPNNERACEVIVPDYQLSLAIGKRGQNARLAAKLTGYKIDIKSESEASAIMEADQAADEATTGATVSEDDATEPAAETVADDTTSEETPVNDATTDVASDESAE

SEQ ID NO: 728 - protein, 405 aa, Leuconostoc mesenteroides
  source 1..405: note = SBS04255_ Phosphoglycerate kinase
MAKLTVSDLELSGKKVLMRVDFNVPIKAGVIGNDNRIVAALPTIKYVLENNGRAILFSHLGRIKSEDDKKELSLAPVAARLGELLGKDVKFVPQTRGEELESAINALQDGEVLMVENTRFEDVVDGEVVKNESKNNPELGKYWASLGDDLFINDAFGTAHRAHASNVGIASNVSQAAAGFLMEKEIKFLGDAVANPVRPFVAIIGGAKVSDKIEIVKSLLNKADKVIVGGGMAYTFDAAKGNKIGNSLFEADKVELAKELMAEAGDKLVLPIDSIAADAFSNDAKTEVVDAEAGIPDGYMGLDIGPKSVKLLQDTLSDAKTVVWNGPMGVFEMSNFAKGTLAIGEELVKVTENGGTTIVGGGDSTAAVQQLGVADKLTHISTGGGASLEYLEGKELPGIASISEK

SEQ ID NO: 729 - protein, 132 aa, Leuconostoc mesenteroides
  source 1..132: note = SBS04255_30S ribosomal protein S8
MSMTDPIADFLTRVRNANLARHEVVEAPASKIKKSIAEILKAEGFIRDFEYIDDNKQGVIRVFLKYGEDRNRVITGIQRISKPGLRKYAKAEELPKVLNGLGIAIISTSAGVITDKEARSKQVGGEVIAYVW

SEQ ID NO: 730 - protein, 178 aa, Leuconostoc mesenteroides
  source 1..178: note = SBS04255_50S ribosomal protein L10
MSEKAIAVKAQKVEEIADQFKAAASAVVVDPRGLTVAQSTELRHQLREEGVVLEVIKNKVLTRAAEKAGYAELNDIFAGPSAVAFSNDDAVAPARILKKFADENEALEIKGGVVDGTIANIDDINKYASLPSREGLLGQLMAEFQFSIRSFAYAVKAVQDKLEEESAAPAAEASTDAE

SEQ ID NO: 731 - protein, 95 aa, Leuconostoc mesenteroides
  source 1..95: note = SBS04255_50S ribosomal protein L23
MDARDIIRRPIITEASMAQTERKRYVFEVDTRATKPEIKKAIEEIFEVKVSGLNTANVRGKKKRQGRYVGYTRKLKKATVTLSKDSKDIQIFNEG

SEQ ID NO: 732 - protein, 563 aa, Leuconostoc mesenteroides
  source 1..563: note = SBS04255_Arginine--tRNA ligase
MVDNIQIVEALNAVLTDLTLQEISEKLEAPKSSDLGDVAFPTFTLAKTLHKAPQLIAADIVAAIDQEGFEKVVATGPYVNFFLDKVATSNQVLKTVFDLEGAYGDNVDGQGAKVTIDMSSPNIAKPMSMGHLRSTVIGNALANITAKNGYAPVKINHLGDWGTQFGKLIYAYKAWGSEEEVKSDPIATLLKYYVEFHEKAKENDSLNDEGRAWFKKLEDGDEEAHRLWQWFRAESLKEFSEIYDRLDITFDSFNGEAFYNDKMDKVVDLLEEKNLLVESQGAQIVDLSHINPNLTPAMIKRSDGATLYMTRDLAAALYRKETYDFAKSLYVVGGEQREHFVQMKAVLSLMGFEWSDDIEHIAFGLITFNGKKMSTRKGDVVLLKDVLDDAHELALKQIQEKNPALGDKDTVAEEVGAGAVVFHDLMNDRTNNFDFNLEEVVRFEGDTGPYVQYTNARAKSILRKTSVQLTSDDLNLTDPATWDIITTLNNFPKTVQRAWQQREASIIAKYALNLSRAFNKYYANSKILTEDVQLNARLVLVKSVSIVLTESLRLLGVKAPEEM

SEQ ID NO: 733 - protein, 189 aa, Leuconostoc mesenteroides
  source 1..189: note = SBS04255_Protein GrpE
MTEKNEEVVEDRNISDQTDENLTEEIESEADDLQVEPDPKQAEIDKLTEQVNNLEEKLLRSQAEIQNIQQRNARELQNVRKYDGQKLASAVLPAVDNLERALQVEANDEVSKQIKTGVEMTLKTLNQALTDNGITSTGEIGESFDPTKHQAIQSVESDEVESDQIAQVLQKGYILQDRVIRPAMVSVAK

SEQ ID NO: 734 - protein, 365 aa, Leuconostoc mesenteroides
  source 1..365: note = SBS04255_protein NusA
MSKELVEALNALESERGIDRLVVVEALEDALKAAYKKQYNTADNVEATFDDKKGNISIKQVKHVVLDDDLEDEEIEISLSDALAINRAYEAGDEIRFDVTPKDFGRMAAQAAKQVIVQKMREAGRQAIYNKFSDYEDEIITGEVDRQDARFLYVNLPGNQEAVMAPNDQMPNERYHMGDRIKVLVNKVENNAKGPQVFVSRTAADLVKRLFEQEVPEVYDGTVEIMSIAREAGDRSKIAVYTHDTDLDPVGAMVGQRGARVQSVVNELAGENMDIVEWVEDEAQYIANALNPSEVTDVIFDPANDRAVTVIVPDNQLSLAIGKKGQNARLAARLTGFKIDIKSESEAAASLDPTPAATAADENEE

SEQ ID NO: 735 - protein, 400 aa, Lactobacillus plantarum; identical to SEQ ID NO: 186
  source 1..400: note = SBS04260_ Phosphoglycerate kinase

SEQ ID NO: 736 - protein, 131 aa, Lactobacillus plantarum; identical to SEQ ID NO: 187
  source 1..131: note = SBS04260_30S ribosomal protein S8

SEQ ID NO: 737 - protein, 167 aa, Lactobacillus plantarum; identical to SEQ ID NO: 188
  source 1..167: note = SBS04260_50S ribosomal protein L10

SEQ ID NO: 738 - protein, 97 aa, Lactobacillus plantarum; identical to SEQ ID NO: 189
  source 1..97: note = SBS04260_50S ribosomal protein L23

SEQ ID NO: 739 - protein, 562 aa, Lactobacillus plantarum; identical to SEQ ID NO: 564
  source 1..562: note = SBS04260_Arginine--tRNA ligase

SEQ ID NO: 740 - protein, 202 aa, Lactobacillus plantarum; identical to SEQ ID NO: 565
  source 1..202: note = SBS04260_Protein GrpE

SEQ ID NO: 741 - protein, 405 aa, Lactobacillus plantarum; identical to SEQ ID NO: 566
  source 1..405: note = SBS04260_protein NusA

SEQ ID NO: 742 - protein, 249 aa, Pichia kudriavzevii
  source 1..249: note = SBS04263_Exoribonuclease, phosphorolytic domain 1
MSRSELLSPEGMRVDGRRYNELRAFECKINTHQHSADGSAYISQGNTKVLCLVRGPSDTLVPSSSNSVTPNNPTEPTISVSIIQPPYAKMERKSTSKNDRRLTELAIFIKRALQQTIVKKNYSRTLIDVSITVLQLDGGLLAACMNAATLAFIDAGIAMYDYISACSVALYDNCPLLDSNSLEETDLSNLTIGVVGNSEKINLLLMEDKIPLDKLQILINLGINGCHTIRQLMDSTVREIGLDILSKKE

SEQ ID NO: 743 - protein, 671 aa, Pichia kudriavzevii
  source 1..671: note = SBS04263_Heat shock protein 70 family
MFKKQYSVLAVLLYAIVLFVLPFASNVQVDADSENYGTVVGIDLGTTYSCVGVMKNGRVEILANDQGNRITPSYVAFTENNERLVGDAAKNQAASNPHNTIFDIKRLIGQRFSDKVIQREIKHLPYKIVDQDDRPVVKVEYNGEEKTFTAEEISAMILGKMKSIAEDYLGKKVTHAVVTVPAYFNDAQRQATKDAGTIAGLTVLRIVNEPTAAAIAYGLDKGEEERQIIVYDLGGGTFDVSLLSIAGGAFEVLATSGDTHLGGEDFDYRVVKHFIKVFKKKHNIDISSNPRALAKLKREVEKAKRTLSSQMSTRIEIDSFVDGIDFSEQLTRAKFEELNIELFKKTLKPVQQVLDDAKVKASEIDDIVLVGGSTRIPKVQELLEKFFNGKKISKGINPDEAVAYGAAVQAGVLSGEEGVEDIVLIDVNPLTLGIETTGGVMTTLIKRNTPIPTKKSQIFSTAVDNQNAVLIQIYEGERAMVKDNNLLGKFELTGIPPAPRGVPQIEVTFTLDSNGILKVSALDKGTGKSNSITISNDKSRLTQEEIERMVEEGEKYAEQDEELRKTILAKNELENQAHNLKNQINDEDGWGAKLDAEDKETLLEAVEEAISFIEENGETASLEEFQEEQEKLTKVVSPIVSKMYASEGGASEGYHDEEEDDDEDDWDHDEL

SEQ ID NO: 744 - protein, 486 aa, Pichia kudriavzevii
  source 1..486: note = SBS04263_NADPH-sulfite reductase
MIGIKQFRQISTINRRKKLAVIGSGPSAFYTVLNILKKNAGNVEIDMFEQHPSPFGLVRYGVAPDHPEVKNCIDRFNDISEFITLGNFKYFGNVPVSKDSTKSLSLQELYDNYNDILYAYGSSLPNLPEVAGIEHPGIISSYEFVNWYNGHPNHQDYEIPLKEVTDVSIVGNGNVAIDIVRILLAPSDGYWSKTDISSKALATLAESRVKRVNVLARRGVLDSKFTNKELRELLEMDKLGVYFQGWNDSSFKEQLADVKLDRINKRRVSLLNKYNHREFSKEEVENGKFWNLQYLKSPVGFKVHNERLLSETIVAENQLLFKDGKWTIEQSGKIGAVKNQLVILATGYKCEPLKEFKELGIPFENGRIPNNNGKVENVDHSYCVGWVSNASRGNINSTVADSEVVADTILREWEKENEDDDEKKGRAVIEGILKERGMEPVDWERWNKIHQLEKLQGSVKGKPYEKLAFNDMLDRTSQDKTRQDSD

SEQ ID NO: 745 - protein, 756 aa, Pichia kudriavzevii
  source 1..756: note = SBS04263_p-loop containing nucleoside triphosphate hydrolase protein
MSANDVLRSLLEIRTDKKLHGANLLQANTNITRPKQATLSNGRRITLKPRTTELDSSIFDMRKEGTSGNGYHDMDALWEKLRIEEKTTKELSEFDSHNRELEQGANELRNLSNKRRVNTLWTEKYRPNKFIDLIGNEKTNAHILKWLNDWTYVVKGGKLIDSNTYGRDMNIDPLKRPRKKVLLIHGPPGIGKTTIAQCVCKQLGYEMHEINSSDERSGPAVKDKVQNAIKMRSLSGKDVCLLLDEIDGAVGSEGGFIRVLINLLQKDLKATEEWNSFSKLKYHKKEHFIRRPIIAMCNDIGARCLDQLKPYCEVVSFKKSSKKSIKKRLKMILESEKVGPINESLLDDLIISLDGDIRNCINFLQLNSKNLNGRIKDSEIVWFQLLKEIFNLENQNIRNKKGKNVIFKELMIKLSNSSSDLTRINNGCFNLMLQLNDEYDNNLKKLDEASDWLYFQDIISKNNTLFDKEELHFYEAVTPLRFFQLFANFTDGQFYDKNARFNFKSQDNFELRKQVNEMISTLLKGYKLRIDRKVLITNEISMLNYIVVPNVSKTAKEFSKDDKKVERVLEILNDLSIRIETYNGGYNGRGDTNVNENGQRRTVVSRSNTYKFKPDIVIGLIDCNSTNKTAAESDWRGYGASYATLNTTRATPFIEVLDEVYRTSLRKHQEANKILKREREKNVEDPEVAKKRAVSSADYFIKQYNTFHSQLHKNEANGGISGRGVMAENENRILVKYHEGFSNAVRKELVWNSLFK

SEQ ID NO: 746 - protein, 702 aa, Pichia kudriavzevii
  source 1..702: note = SBS04263_PAN2-PAN3 deadenylation complex subunit PAN3
MSSTPYDWAKNIPCRNIQIHGFCKFEHKGCSYNHDLASKESSIEAPPSASTSESMSDNHKSKGLNGPKLNTSITSSNNTFAEQNSISSPVTSAQHFKPTLLKQSSSFSNEIGPNGVSSSARKFNVASPAFTPISANKFSAMSPSLDTIPTFTPSNIPVPNYDQTHPQQEEPSAVASTLRSPTNDLNVSSGKPHTSNESPLNDMNSLKSSISTATSFNPVTAPIFTPDSNLPSNPTTDAHFHSQPLGEQLFYQNTNPYPVNFLLYAPPPPPHIELNKRSNERTVNDLFIDNKLREYLQMKNEESLKSISHTELDLPRNVGVYHSLYPIDKNFDYSTKSFGYTSIVYKCMSNTDGRLYAMRRLQNVPISSASVLNSVKKWKKLNCSNVVKIHEVFTSRAFNDNSLVLIYDYYPMSLNLMENHFMSLPGKNPELITEDCLWNYTIQLLNAITEASKLSLTIGELNPSKIIITNKGRIRLSAVAIKDIIKDVKNSLNNTGAVAKKEEPPESSDLLELGKLIFFLAKSTTLIQEPSDDPAKIVAQLKYSSAFKDALLYLLSGSPTIEEFQRLVAPMILKLADGLQNSCDAMESTLMGELENARLVRLFAKLDFISERPEMVKDGSWSETGERYPIKLFKDYVFHQIDDNGNPVVDLTHVINCLNKLDAGVDENLLLVSPDEMTCLIMSYKELKELINKTFLTLLGKE

SEQ ID NO: 747 - protein, 985 aa, Pichia kudriavzevii
  source 1..985: note = SBS04263_Ribosomal protein S5 domain 2-type fold
MPTRQGIMDDQEKDELMFDEFGNLLNDDSGSSSDSESDMSLDHESTENTTSTAIVKSEESNTNLSLSKTFDPSVETIIASVDTKSLNEPIVEPNVEKKFLIEERNLPHTDYSKEYMWRLTSLPERVRNVALCGNLHAGKTSLLDMLVEQTHTFDNNDKRDKEKPLRYTDNHILEIKKGISIKSSVMSMLLPDMKDSSTVVNFIDTPGHSNFCDEIMVGARLADIIILCVDVVESVTKTVELVIEAALKMKTKIVLMITKIDRLLLELRLPTLDAYYKIRRTIEQVNETITNICQSLDLNPNDENVRLSPELDNVCFSSSVFNLVFNLKSFTQKYIEQNNLSKNVKVTVDSFSTKLWGDIYYENRKFFVKPKDPLACANSRTFIKFILEPIYKLATVSLTLDAPDRKEFTEQHMKLRMKNYTYKLDSKPFLKHIFTEFFGFPSKPLLSALKNTVSPKENSDSKLEYLFTGPKNSDVAHYVHDCSPSNPLVANVVKLVDTHDSEHFYALVRVFSGTLKCEDTVRLLDESNSSLGSDSFKMQKISKCYMWCGRYRVEVTELRAGSIGLISGPAIDQFIVKTATIYDKRIDPSSNFTFKQLEQTIPPVFKVALQAYNPKELNKFLDALKKLNRSYIGCEVSVEDNGEHSILGYGELYMDCLLHDLRILYGGIDIKVSDPMVRFNETTDELSKIKLTTKSNNGKNSISIIAEPLAPEIANDIRRGILSLRNDPPRQFAKKLRDKYKWDSLAARSVWSFGPADTGTSILCDDTLPEEVDKDLLKSYKSPIVKGFQWAVKEGPLCDDVVSEVKFTIIDVQLAPELADRNDAQIIQMVRKACHAALLIGAPKLLEPIYQIESICHVDALGALDLLLERRRGFVIGKERIEGSLLWKVNGIVPVIESVGLEVDLRLSTRGLAYPQMIFSRWDRVPGNPLDDTVFIPLLKRVPLSSTARDFMMKTRRRKGLKEDVSLQNYVDRDTWNMLMEIGAM

SEQ ID NO: 748 - protein, 236 aa, Pichia kudriavzevii
  source 1..236: note = SBS04263_Ribosome assembly factor mrt4
MPRSKRSKLVTLAQTDSKGRENKERIFDEIREALDTYKYTFVLGLDDVRTPVLQEIRKDWNGSKLILGKKKVIQKALGQTPEEEYKNNLHKLSKFDNGLIGLLLTDETPETVTEYFDSYVRNDYARAKTRSPITFELPEGIVYSRGGQIPIEEDVPMSHSMEPTLRNKFKLPTKMVHGKITLTEPVRVVEKDQVLDVTQALILKTFGVACAAFKVKVYAYHDGESNDVVSLIKEEN

SEQ ID NO: 749 - protein, 886 aa, Pichia kudriavzevii
  source 1..886: note = SBS04263_WD40-repeat-containing domain
MPDEYNVSLTSGGQLIPHLNRLSTDGHYSITFFNNHITIYSIQSRLAIRTFHEIPGLTFSNIVDTCISPINNNLIYVATHSKVFIINWYDNVKIPLVSTISLSLSLSEKMFDIVKIINFQEKSETVVNLLLKAKKQYAIVSYDLDKNEILRTYKVYENIQQYAVSSNLKNLAFSNSSGAVQVFTFDDENTAELTSFQTTYNTSGSQIVKIAVSNDQTDPLLAIGTSHGPVILLFDLLSSKPTQRTLKWHIEPVKALTFNHDQSYLLTGGSEKVLVYWNIITEKQQFLPRLNGVIEDIQINYSVPSLVGLSLNVIDNDFQYIVLGTTDLLSKLDINTPHIYSGLNKNNQLFKNIQRDVSSFNKSKQFTKIKHDYKLGFRIHPSSNHLYLPAGRHLQIYDYLHNTQIDNLAVAPAIQQYGKVGIENKISDPMVVGFEFIKCAKTNSKDWLVTCDVEIRGEAEDITNPSIERWETLRFWRNSGGNQQNDKLAVSDSWSLQTKMLRPHDEFQITSINPAPDAYFGGEALLTADVCGNVKLWRPNSQGIWSLRKFYSSGSEFNNSTAPSKKAENATNIINSEGTLCSWSSDGSMIAVGRNGKVILLDVNTFEPIHTIEPAIHASRFHTHASIDGKSEEKVTISKPKDAQKRYIDMHLQDNHLQSIDFTSNGKLLVIQARTHLCVVDILKNRVIFGLLLSGEGGKSGYGGSFVRLVPRSKRDINDEDSTDLEENTTDELMVVGKYMNSKGSVKSKVTLWNISDKKSTIDCKWCYNSSEPIVGAEWSPAWGKWIIIDIKSNIGEIGFGTSTRNELLVKSSKEQEENWIVSSLLDNARTINRATTISVSSRKNSDGDGAFNDRVGLHSTAFDGILDNLEGVSVSTLFERVLKVV

SEQ ID NO: 750 - protein, 585 aa, Pichia kudriavzevii
  source 1..585: note = SBS04263_Zinc finger C2H2-type
MKTDYYELLGVSESATSVELKKAYRKKALLLHPDKNPDDIEHTTRLFNEVRVAYETLSDPQERSWYDSHKFQILMEDGDEQSSSACYYEDETNMYYAGTTVEDIEKYMNSNLYKNFDDSINGFYSIVSVLFDKIASEEVTAGKQQKIPEFAKYKDDTSFATVCDPKELLYPRIGNSKNDFEDTRMFYKVWSGFQSVKTFAWCDEYRYSTAPDRRTRRIMEKENKKLRDTAKKNYNDAVKKFVAYIKKLDPRMDPKFRRQYERQKLSKQREELKKQAEIEKQERQRQRQLFEEQDWQAIDPDDLAEIEAQLDKIYSEEKDIDDASADEANADIFECVICNKVFKSEKQFEDHERSKKHLKLLKQLKWEMKKEGIELGIDEDGYINEGLDDEDLGASDEFDDALETLSDLDELTNEELEAMIQSQLEEQQVQEALFGEETLEENAVCDEAKHKDNESQNIVCESEEEIDYLLNDDLYDSNHNEERRSQKELRRNKTERKLEELSNLLNGAVLSDDDEEAWCNQKVKAKKGKTKPKINNTRNKATTNTEACSVCKETFSSRNKLFQHVNSTGHAAPISKVKKNKRSKK

SEQ ID NO: 751 - protein, 574 aa, Pichia kudriavzevii
  source 1..574: note = SBS04263_Zinc finger, RING/FYVE/PHD-type
MDNGRQRFGLLGYILASTLIAIHKLAALYDESPNFYVLGAKVSHGDAVIIFGNLLVSMFFGAGILLQNLVFGELRLIEVEHLYERLWPTIISLVVSANIYKSSENSFLLIISSLGLVTSKVFHCIVVDRLDFLIQQHYQRNDQKIWKILVNRVILLLIALLRMDIFMIVSCIDESFIHKSPLLLVLSFEFFLLCIDLSYATVKFSLDVFELYYLQKYPEEEVWAWKKWIDSITKVIISLIKTIMIPTLLFFFAMLESFPFNLFGELFTTILQLFKSVSNLFRLIKSAKRLNDCLGYPTEEELNDCDICIICRDDLTMGGTGTSRSVPRKLNCGHILHDGCIRSWLEMSNACPTCRKDVIPGKDSERGGRRNQQEAEQIELQARVEGPEREEQVPQVEEAAEEPLGGHVDHVVTPAVPTPTMPPSPSPPTVPAEEEEYSRYFEGVPMEAPTTVDRYGDTYTGTVGNSSGISNKLGQVMSRIGGLELNDGQRRQFEHAQALLEGEGEGVVDDEECDFVHELPPGSEVPGDWTIFPVEKGSKEDEFRVRVGRSTRLRVRRVRNGRLVDEETFNKYTR

SEQ ID NO: 752 - protein, 132 aa, Weizmannia coagulans
  source 1..132: note = CS00020_30S ribosomal protein S8
MVMTDPIADLLTRIRNANTVRHEKLEVPASKIKREIAEILKREGFVRDVEYIEDNKQGIIRIFLKYGANNERVITGIKRISKPGLRVYAKAGEVPKVLNGLGIAIVSTSQGVLTDKEARKNNVGGEILAYVW

SEQ ID NO: 753 - protein, 166 aa, Weizmannia coagulans
  source 1..166: note = CS00020_50S ribosomal protein L10
MGSVIEQKKQLVEEITDKFKSSTAVVVVDYRGLNVAEVTELRKQLREAGVEFKVYKNTMTRRAVEAAGLDGLNSVMTGPNAIAFSTEDVVAPARILNDFAKDHEALEIKAGVIEGNVATVDEIKALATLPSREGLLSMLLSVLQAPIRNFALAAKAVADQKEEQSA

SEQ ID NO: 754 - protein, 94 aa, Weizmannia coagulans
  source 1..94: note = CS00020_50S ribosomal protein L23
MDARDVLKRPVITERSMELTADKKYTFEVDVKANKTEIKDAVEEIFGVKVAKVNVANYKGKFKRMGRYTGYTNKRRKAVVTLTPDSNEIEIFEV

SEQ ID NO: 755 - protein, 220 aa, Weizmannia coagulans
  source 1..220: note = CS00020_Protein GrpE
MADEQNKRASEEVKDEQKRASDEVKEGQIESVFAEEKDTENQQAPPEGEGNGAEKAEKPETENAAEELKKAKEEIEKLRNELDQAENRYLRLRADFDNYRRRVNLDREAAEKYRAQDLIVNLLPALDNFERALSMAEKNEHTAQLLDGMEMVYRSILEALKKEGAEPIEALGKEFDPHYHQAIMQGQEEGTASNVVIEEFQKGYMLKDRVIRPSMVKVNE

SEQ ID NO: 756 - protein, 394 aa, Weizmannia coagulans
  source 1..394: note = CS00020_Phosphoglycerate kinase
MNKKSIKDVELQGKRVFCRVDFNVPLKDGNVTDDTRIRAALPTIKYLVENGAKVILASHLGRPKGQVVEELRLTPVAKRLSELLGKDVKKANEAYGESVKAEISKMNNGDVLLLENVRFYPGEEKNDPELAKEFASLAELYVNDAFGAAHRAHASTEGIAHHLPAVSGFLMQKELDVLGKALSNPERPFTAIIGGAKVKDKIGVIDNLLDKVDNLIIGGGLAYTFVKAQGHEIGKSLLEEDKIDLAKSFMAKAKEKGVNFYMPVDAIVADEFSETANKKEVAIEEIPADWQALDIGPKTVELYAKVIKESKLVIWNGPMGVFEMDAYANGTKGVAEALADATGTYSIIGGGDSAAAVEKFHLAEKMDHISTGGGASLEFMEGKTLPGVAALNDK

SEQ ID NO: 757 - protein, 399 aa, Weizmannia coagulans
  source 1..399: note = CS00020_protein NusA
MSSELVDALTILEEEKGISRDVLVEAIEAALVSAYRRNFNQAQNVRTDLNLANGTIRVFARKDVVEEVFDPRLEISLEDAQKINPSYEIGDVVELEVTPKDFGRIAAQTAKQVVTQRVREAERGIIYNQFIDREDEVMTGIVQRKDPRFTYVSLGKTEALLPPGEQSPNETYNPHDRIKVYITKVERTTKGPQIFVSRTHPGLLKRLFELEVPEIYDGIVEIRSIAREAGDRSKISVYTDRPEVDPVGACVGPKGQRVQAIVNELHGEKIDIVKWSDDPAKFVANALSPAKVLDVLVDENNKATTVIVPDYQLSLAIGKRGQNARLAAKLTGWKIDIKSETDARESGIYPRSETNDDIDGETPGLFDDDDAGRTSEALAVPDAKEADLPENGGKDEEIE

SEQ ID NO: 758 - protein, 554 aa, Weizmannia coagulans
  source 1..554: note = CS00020_Arginine--tRNA ligase
MNIAEQMQETLKTEIKEAVMKTGLVAEADIPAIVLEKPKEKAHGDYAANIAMQLARAAKKAPRQIAEAIVEHIDKSKTSIEKVEIAGPGFINFYLDNTYLTRLIPSILHDGADYGRSDAGGGKKIQVEFVSANPTGDLHLGHARGAAVGDSLCNILEKAGYEVTREYYINDAGNQIHNLALSVEARYFQALGIEKEMPADGYYGQDIIDLGKKLADEYGRKFVDTDEKTRYEFFRQYGLDYEMAKLKKDLEDFRVRFDVWYSETSLYKSGKIDEMLKLMREKGHIYEKDGATWFCSTAFGDDKDRVLIKNDGTYTYLTPDIAYHKDKFDRGFDTLINIWGADHHGYIPRMKAAMEALGYNSDNLEVEIIQLVHLYKNGEKMKMSKRTGKAVTMRELIDEVGLDATRYFFAMRSSDTHLDFDLDLAVSESNENPVYYAQYAHARICSILRQAEEKGFAPDTDADFSVIRSEKETDVLKKLGEFPQVIAEAAEKRIPHRITNYINELAANFHSFYNAVKVIDPAHADATKARLALVKAVQITLKNALQLIGVSAPE

SEQ ID NO: 759 - protein, 488 aa, Candida sp.
  source 1..488: note = SBI00225_Zinc finger C2H2-type
LMESQRQLLEELDCLEAATAQRFRRNPELGKLAQVPTDPVLENKRKRPHKESLLQQHELRYFGTQYEKTRSRALENLNPTLLDQIEAQRDPKLTFDAVFRAVTDVESKYRAQPSMSATPLLLELSMYLSAPTEDTKPGPPKKVKRKHFLSRGTTHLAAHLEEVFSEQEVYGKVLDLTVFYDMFKTLFPRQLTYAEYLTTFNQFTDKLTSAEYARYLEALLLYLIRMHENCYPLQPLLQWEEKAEPDGKPNEHGEVFCKPCEKLFARETVYTAHLTGKKHKKNVKDGGAKATKTGAHDLEHRIQQITGTMYKLVKATIADYERRSSLSDREKMLESLAMDGEESEFTAEETSSEVEDKDDDDDEFYSKDLPIGTDGTPIPLWLYKLQGLHRTYNCEICGNVKYKGRQQFTKHFGQVKHIHGLTCLGIGENETYLFDSIHTIAEAQALWSKIKRAKRNEEEELDNVEIEDDDGNVMSHKDYVELKKQGLI

SEQ ID NO: 760 - protein, 322 aa, Candida sp.
  source 1..322: note = SBI00225_Ribosomal protein S5 domain 2-type fold
LVKSGYVRAFLRPFFSSFPRLQALTPSPEAGLDLANDIASGRPLVPKLKPNEPRPVRFAASNLNTDSMTKWELERLRIVPKLATFYGGNPVHEDNINQLNALVRKYKNLPTRVLDVKELKMYKFVSLEDYRKKAQSGTRLKIGHHKELLELLNRLRSIEPELMPKEVIETLLSYSSTLEDKKRVVQQAIKTLDEFGRANTVGKRKRAVANVSMVKGEGMVVVNGQSFSEFFKRDIDRSKIAYPFKVVSQEGQFNIFITTEGGGISGQAEAAMYGISKALVVFNPLFKSRLRLAGLMSRDARKVERKKPGKVKARKSPTWVKR

SEQ ID NO: 761 - protein, 228 aa, Candida sp.; identical to SEQ ID NO: 238
  source 1..228: note = SBI00225_Ribosome assembly factor mrt4

SEQ ID NO: 762 - protein, 244 aa, Candida sp.; identical to SEQ ID NO: 232
  source 1..244: note = SBI00225_Exoribonuclease, phosphorolytic domain 1

SEQ ID NO: 763 - protein, 404 aa, Candida sp.
  source 1..404: note = SBI00225_WD40-repeat-containing domain
NRRLRFASQHPLYGMDWANDANGDWLALSLFREGFQNRIQVVHGALTREMDDDHQYDGGIADLPTSGSSGPSDELRTALPGITTALDFAKVTETAVDYPVTHLQWDPHMLSPGSQRLAVLLEVLRLYRMTPEPEPSLVQTHLLANNSTAAGGDAYDINTFPPVTSFDWNRTDPTVLITLSVDTTCTVWDLARLHPLHGDKDTAHVKTQLIAHDLEVFDVQFLHHSTSVFASVSNDGLMRVFDLRLLEHSTIIYEPTAATVPPPHVPAAHYNPLALVALAASNVDQHHLATVGVNLNQVLVIDMRMPGAPATTIDALFGGMSSGAVNLIAWHPLSNLLLTGGDDCQALVWDIGPESARPQPDAHTVVDTPALAHSEDLEVNLVCWLGSGDWVGVVSGKSFQAVQM

SEQ ID NO: 764 - protein, 993 aa, Candida sp.
  source 1..993: note = SBI00225_Zinc finger, RING/FYVE/PHD-type
MSLPSTWRQFQLFDFLPIRDPNYQSTEPLFSDPLLTAITNTLTYIAFATHTYVKLLTKDKLTLAGQFCGYESGYRITFMKALAHSNLLVTLAEKQGSPAVIKVWDLNKILQLDQSSNSEENTIHKYVTKVLVHDKNDAYPISCFTFNDYLTCIAIGYTNGRVVLVRGDMLRDRGSKQRLVYESVDPITGVHFNKIDDVLYVTTTSKILTVLTTGRNDGKPLRVLSGSLGVSLGCSDLDLRLSKLIVANTEGFKYYNHVSKAQVINFSLEKKQILRLFKDYLLVVCPIEEVGSTTKKTLTRIIILDLQNMHISFSLTVPNLTVSHLFVSGTDNDVFLLSTDGVLYKLHEKPINQQVEIVLQRNLFSIALTLADQYNLDDYSHFRINKLHADHLYENLDYDTSIAKYMDCLLLINSAKASSSAESVDVDDFVINVIKRFKEVSNIHNMTQFLARLYELKLADSDHLTLLLCCYCKLKMTPELDSFIDSLDVDEATDSQGNNPTTHLNFPLIINLFKECGYFNQVIKLLYKLNHPHMIVEVQLNELNQFSNCMSYMKTLTIDELLRILIDFLKDLLDSMPLETTELLINVFTGKYKPEPTHTLFDETLSVSPSNEVENETIHNTVSSYTAFLRYLGGNTIKNVGEETEESKDIEPTYLPPRPSLVFSCFISHPREFVVFLEACMEAFDKYQGNTADKKDLLITLFEMYLSMSQEEVDQKDEWLAKAKALIYDNPKMIDESSVLLISHVYNFKEGEIFAKQSSDEFEEGLLRMAQASGDLKAAFEVVNKYGEKKPILYKMVFKFIFSSNDIFKQASPSEFRILLEKLSVHKIATTLDIINIVSSNKNATIGLVKDFLIDYISQANKEITNNTRLMQSYESESTKNSLKLTELTTKPVIFQNNKCSSCELKLDFPLIHFKCKHSYHQRCLNENIYIPTESADDKPKCPLCIHELQASNSLRENQFKSKENYEAFEMSLNNSSDRFKVVSEYLGKGIME

SEQ ID NO: 765 - protein, 679 aa, Candida sp.; identical to SEQ ID NO: 233
  source 1..679: note = SBI00225_Heat shock protein 70 family

SEQ ID NO: 766 - protein, 447 aa, Candida sp.; identical to SEQ ID NO: 234
  source 1..447: note = SBI00225_NADPH-sulfite reductase

SEQ ID NO: 767 - protein, 672 aa, Candida sp.; identical to SEQ ID NO: 236
  source 1..672: note = SBI00225_PAN2-PAN3 deadenylation complex subunit PAN3

SEQ ID NO: 768 - protein, 716 aa, Candida sp.; identical to SEQ ID NO: 235
  source 1..716: note = SBI00225_p-loop containing nucleoside triphosphate hydrolase protein

SEQ ID NO: 769 - protein, 361 aa, Bacillus subtilis
  source 1..361: note = CS00001_Endo-1,4-beta-glucanase
MAKLDETLTMLKDLTDAKGIPGNEREVRQVMKSYIEPFADEVTTDRLGSLIAKKTGAENGPKIMIAGHLDEVGFMVTQITDKGFIRFQTVGGWWAQVMLAQRVTIVTKKGDITGVIGSKPPHILSPEARKKSVEIKEMFIDIGASSREEALEWGVLPGDMIVPHFEFTVMNNEKFLLAKAWDNRIGCAIAIDVLRNLQNTDHPNIVYGVGTVQEEVGLRGAKTAAHTIQPDIAFGVDVGIAGDTPGISEKEAQSKMGKGPQIIIYDASMVSHKGLRDIVVATAEEAGIPYQFDAIAGGGTDSGAIHLTANGVPALSITIATRYIHTHAAMLHRDDYENAVKLITEVIKKLDRKTVDEITYQ

SEQ ID NO: 770 - protein, 395 aa, Bacillus subtilis
  source 1..395: note = CS00001_Acetate kinase
MSKIIAINAGSSSLKFQLFEMPSETVLTKGLVERIGIADSVFTISVNGEKNTEVTDIPDHAVAVKMLLNKLTEFGIIKDLNEIDGIGHRVVHGGEKFSDSVLLTDETIKEIEDISELAPLHNPANIVGIKAFKEVLPNVPAVAVFDTAFHQTMPEQSYLYSLPYEYYEKFGIRKYGFHGTSHKYVTERAAELLGRPLKDLRLISCHLGNGASIAAVEGGKSIDTSMGFTPLAGVAMGTRSGNIDPALIPYIMEKTGQTADEVLNTLNKKSGLLGISGFSSDLRDIVEATKEGNERAETALEVFASRIHKYIGSYAARMSGVDAIIFTAGIGENSVEVRERVLRGLEFMGVYWDPALNNVRGEEAFISYPHSPVKVMIIPTDEEVMIARDVVRLAK

SEQ ID NO: 771 - protein, 323 aa, Bacillus subtilis
  source 1..323: note = CS00001_Phosphate acetyltransferase
MADLFSTVQEKVAGKDVKIVFPEGLDERILEAVSKLAGNKVLNPIVIGNENEIQAKAKELNLTLDGVKIYDPHTYEGMEDLVQAFVERRKGKATEEQARKALLDENYFGTMLVYKGLADGLVSGAAHSTADTVRPALQIIKTKEGVKKTSGVFIMARGEEQYVFADCAINIAPDSQDLAEIAIESANTAKMFDIEPRVAMLSFSTKGSAKSDETEKVADAVKIAKEKAPELTLDGEFQFDAAFVPSVAEKKAPDSEIKGDANVFVFPSLEAGNIGYKIAQRLGNFEAVGPILQGLNMPVNDLSRGCNAEDVYNLALITAAQAL

SEQ ID NO: 772 - protein, 293 aa, Bacillus subtilis
  source 1..293: note = CS00001_Glucose-1-phosphate thymidylyltransferase
MKGIILAGGTGSRLYPITRGISKQLVPIYDKPMIYYPLSVLMLSGIKEILIISTERDLPLFKQLLGNGENLGLSLTYEIQKKPRGLADAFLIGEEFIGDDNVALVLGDNIFYGQGFTNLLDKAVSLKEGAIVFGYYVKNPEDYGVVDFDSEGRVIGIEEKPKVPKSNYAVPGLYFYDNNVINIAKKIEPSERGELEISSINEYYLKQGNLKVEIMGRGMAWLDTGTHKSLLEASNYVEAVQNRQGLYIASLEEIAFRKGYISAEKLHKLALPLNKTEYGKYLIKLVENNEIKS

SEQ ID NO: 773 - protein, 445 aa, Bacillus subtilis
  source 1..445: note = CS00001_Putative aldehyde dehydrogenase
MEQQVKDDIQRVFQLQKKQQKALRASTAEQRIEKLQRFLDSVIAHEEEIIEAIRKDVRKPYHEVKKAEIEGTKKAIRDNMNNLEKWMAPKEVGSSLSPEANGILMYEPKGVTLILGPWNYPFMLTMAPLAASLAAGNSAIVKLSDFTMNTSNIAAKVIRDAFDEKEVAIFEGEVEVATELLDQPFDHIFFTGSTNVGKIVMTAAAKHLASVTLELGGKSPTIIDSEYDLMDAAKKIAVGKFVNAGQTCVAPDYLFIKKDVQDRFAGILQTIVNAGFMEDDHNPDRSKFTQIVNDRNFNRVKDLFDDAIEKGAEVVFGGVFDASDRTISPTVLKNVTPDMKIMQEEIFAPILPMMNYEDIDEVIDYVNDRDKPLALYVFSHNQDLIDNVLQHTTSGNAAINDVVVHFSDVNLPFGGVNTSGIGSYHGVYGFKEFSHEKGVFIQASK

SEQ ID NO: 774 - protein, 475 aa, Bacillus subtilis
  source 1..475: note = CS00001_3-polyprenyl-4-hydroxybenzoate decarboxylase
MAYQDFREFLAALEKEGQLLTVNEEVKPEPDLGAAARAASNLGDKSPALLFNNIYGYHNAQIAMNVIGSWPNHAMMLDMPKDTPVKEQFFEFAKRYDQFPMPVKREETAPFHENEITEDINLFDILPLFRINQGDGGYYLDKACVISRDLEDPDNFGKQNVGIYRMQVKGKDRLGIQPVPQHDIAIHLRQAEERGINLPVTIALGCEPVITTAASTPLLYDQSEYEMAGAIQGEPYRIVKSKLSDLDVPWGAEVVLEGEIIAGEREYEGPFGEFTGHYSGGRSMPIIKIKRVYHRNNPIFEHLYLGMPWTECDYMIGINTCVPLYQQLKEAYPNEIVAVNAMYTHGLIAIVSTKTRYGGFAKAVGMRALTTPHGLGYCKMVIVVDEDVDPFNLPQVMWALSTKMHPKHDAVIIPDLSVLPLDPGSNPSGITHKMILDATTPVAPETRGHYSQPLDSPLTTKEWEQKLMDLINRKG

SEQ ID NO: 775 - protein, 325 aa, Lactiplantibacillus plantarum
  source 1..325: note = CS00007_Phosphate acetyltransferase
MDLFESLAQKITGKDQTIVFPEGTEPRIVGAAARLAADGLVKPIVLGATDKVQAVANDLNADLTGVQVLDPATYPAEDKQAMLDALVERRKGKNTPEQAAKMLEDENYFGTMLVYMGKADGMVSGAIHPTGDTVRPALQIIKTKPGSHRISGAFIMQKGEERYVFADCAINIDPDADTLAEIATQSAATAKVFDIDPKVAMLSFSTKGSAKGEMVTKVQEATAKAQAAEPELAIDGELQFDAAFVEKVGLQKAPGSKVAGHANVFVFPELQSGNIGYKIAQRFGHFEAVGPVLQGLNKPVSDLSRGCSEEDVYKVAIITAAQGLA

SEQ ID NO: 776 - protein, 397 aa, Lactiplantibacillus plantarum
  source 1..397: note = CS00007_Acetate kinase
MGKTIAINAGSSTLKFKLFEMPQERVIAQGAVERIGFKTSPVNIRYGVDHHYQEKAVVADHLAAVNIVLDELIKLRIIDSYDEITGVGHRVVAGGEQFHDSVLITDQVLKQITDLAEYAPLHNPANAVGIRAFKRVLPHVPAVAVFDTAFHASMPAVNYLYSLPYDYYQRYGARKFGAHGTSHRYVAVRAAKLLGRPLETLKLITLHLGAGSSITAIDHGQSLDTSMGFTPLAGITMATRSGDVDPSLVAYLMKKLNISDPDEMLTILNTQSGLLGLAGSADMQELEARYDEDSQAQLAIDIFVNRIVKYVGAYLAELQGADALVITAGIGERDARMRQRIADRLTYFGVAIDPTKNQVSGVERDLSTTDAKIRTLLIPTDEELMIARDVERVAQNQ

SEQ ID NO: 777 - protein, 603 aa, Lactiplantibacillus plantarum
  source 1..603: note = CS00007_Pyruvate oxidase
MVMKQTKQTNILAGAAVIKVLEAWGVDHLYGIPGGSINSIMDALSAERDRIHYIQVRHEEVGAMAAAADAKLTGKIGVCFGSAGPGGTHLMNGLYDAREDHVPVLALIGQFGTTGMNMDTFQEMNENPIYADVADYNVTAVNAATLPHVIDEAIRRAYAHQGVAVVQIPVDLPWQQIPAEDWYASANSYQTPLLPEPDVQAVTRLTQTLLAAERPLIYYGIGARKAGKELEQLSKTLKIPLMSTYPAKGIVADRYPAYLGSANRVAQKPANEALAQADVVLFVGNNYPFAEVSKAFKNTRYFLQIDIDPAKLGKRHKTDIAVLADAQKTLAAILAQVSERESTPWWQANLANVKNWRAYLASLEDKQEGPLQAYQVLRAVNKIAEPDAIYSIDVGDINLNANRHLKLTPSNRHITSNLFATMGVGIPGAIAAKLNYPERQVFNLAGDGGASMTMQDLATQVQYHLPVINVVFTNCQYGFIKDEQEDTNQNDFIGVEFNDIDFSKIADGVHMQAFRVNKIEQLPDVFEQAKAIAQYEPVLIDAVITGDRPLPAEKLRLDSAMSSAADIEAFKQRYEAQDLQPLSTYLKQFGLDDLQHQIGQGGF

SEQ ID NO: 778 - protein, 331 aa, Lactiplantibacillus plantarum
  source 1..331: note = CS00007_Glycosyltransferase
MQNPRLTIIVPCYNEEAVLPKSTHILDGILTDLIQHKQVNAASKLLFVDDGSQDKTWKLIKSLEKQYSTVTGLKFSRNFGHQNALMAGMQVASPTAEIVITIDADLQDDPQVIPEMVARYRAGSDIVLGVRNDRSSDSLFKRWTADGFYRLMKRIGVQLVPNHADFRLLSQRAVQALLTYEETNLFLRGIVPRLGFPTTKLYYHRQPRFAGVSKYPLRKMVAFAFDGITSFSIAPIKVILLFGMVISGGSLMMMLYALIQGLLGTATSGWSSLMTSLWFLGGMQLIGISIVGEYVGKIFAEVKHRPRYIIETDDYTATQQPAIVNSQRVHG

SEQ ID NO: 779 - protein, 221 aa, Lactiplantibacillus plantarum
  source 1..221: note = CS00007_Sugar transferase
MHEVEINESIVADEQHCEFISKIGVPVTGWRMDLKRCFDLAVGLLGTLLSVPIVIVFAILIKLTSDGPVFYKQERVGWMGTTFDVIKLRSMYQDAEAQTGAIWAKKNDPRVTPVGRWMRKTRIDELPQFWNVLKGDMSLVGPRPERPELTEQFSERYPDFPKRLRIIPGITGYAQINGGYDITPGAKCQYDNYYIEHFSIWFDIKMLMGTVRVIISGDGAR

SEQ ID NO: 780 - protein, 273 aa, Lactiplantibacillus plantarum
  source 1..273: note = CS00007_Tyrosine-protein phosphatase
MTWTLKLTVMGTAIMGLRPTEYIDLHCHLLPGLDDGPQQLAQAVEMARQAVADGIHYVLATPHHLDRRYQNTGLVVERAVAELQAELKRQQIPLTVFAGQEVHLRDDLATALPHLLGIDVGRRYLLLELPHEQVPNYVAQVIFELLQQGTTPVIAHPERNAQIMAQPERLYDLVQQGCLAQLTAGSLVGQFGRAVKSTALELVECGLVQVIASDAHLMARRGFMMRAGYQALARLDSTNPASFAVNARLLLNGDPVVLGEVLRPNQRRKFWLF

SEQ ID NO: 781 - protein, 235 aa, Lactiplantibacillus plantarum
  source 1..235: note = CS00007_exopolysaccharide biosynthesis protein
MKLRRRVANMHTGIQLTTLTAPMSVVTEQVKTIRTNLNYAMVGKPLKTLMITSAIQGEGKSTVGSNLAVEYAKKGLQVLLVDADLRRPTIHQTFAISNQRGVSSWLSGQLTDVNEAIYPVLDHLFVMPSGPKPPNPAELLASDRMTEFLTVATRKLDLVIVDAPPILPVTDARILAGQVDGTVLVVRQNFVEKVAVRQAVSALKNARAQLLGTILNDVDIKTHGYGYGYYGTETN

SEQ ID NO: 782 - protein, 252 aa, Lactiplantibacillus plantarum
  source 1..252: note = CS00007_exopolysaccharide biosynthesis protein
MEQVITFDFIVKLIRQYWKVLLSLMILGGTIATVVTLWVIQPEYQANVQILVNRKHSSAGADLTGQQADVQMITTYKELITKPVVLKPARQTLMAETDIRRSLESLKQTVSVTSTANSQVFSIVVRDKNAKASAMIANQIAATFKDQVQHIIRVNNVTIVAPAETPDQPVAPKKIINILIGFVGGLILGLVYASVRILSNRRVQTLEYLADELMLTSLGIINHQQPVTATHDQPAIKPQPVTSVVKAAVKRV

SEQ ID NO: 783 - protein, 331 aa, Lactiplantibacillus plantarum
  source 1..331: note = CS00007_UDP-glucose 4-epimerase
MSILVLGGAGYIGSHMVDRLVEHGTDVVVVDNLVTGHRAAVNSAAKFYQGDLRDADFLNHVFDTEDIEAVVHFAAFSIVPESMSKPLKYFDNNTGGMITLLETMQAHNVKQIVFSSTAATYGTPKQIPIKETDPQLPINPYGASKLMMEQIMHWADVAYGIKFVALRYFNVAGAKPDGSIGEDHGPETHLVPIILQVAQGKRDELKIFGDDYNTPDGTNVRDYVHVVDLADAHILALKYLAAGNDSNAFNLGSSTGFSNKQMLAAAREVTGQPIPAKLAPRRPGDPDSLVAASDKARDVLGWQPNYDNVNDIIETAWAWTQKHPNGYDDRD

SEQ ID NO: 784 - protein, 334 aa, Lactiplantibacillus plantarum
  source 1..334: note = CS00007_UDP-glucose 4-epimerase
MAVLVLGGAGYIGSHAVDRLVAKGYDVAVVDNLVTGHRAAVNEHARFYEGDVRDTAFMNTVFDQENVEGVIHFAAFSVVPESMKDPLKYFDNNTAGMVKLLEVMAKHDVKKIVFSSTAATYGEPKQVPIKESDPQVPTNPYGESKLAMEKIMHWSDVAYGIKFVALRYFNVAGAKPDGSIGEDHAPETHLVPIILQVAAGERDQLQIFGDDYPTPDGTNVRDYVHVVDLADAHILALEYLKQGHDSDAFNLGSSTGFSNKQMLDAAREVTGKPIPAVMAPRRAGDPSTLVAASDKARTVLGWTPQYDDVKEIIKTAWTWKESHPAGYDDRGGQA

SEQ ID NO: 785 - protein, 377 aa, Lactiplantibacillus plantarum
  source 1..377: note = CS00007_UDP-galactopyranose mutase
MNEQYDYLVVGAGLFGAVFAHEAALRGKRVKVIEKRDHIAGNIYTKEVAGIQVHQYGAHIFHTSDREIWDYVNQFAEFNRYTNSPVANYKGHMYNLPFNMNTFSELWGVRTPAEAAAKIAEQRAAANLGDHQPRNLEEQAIALIGTDIYEKLIKGYTEKQWGQKATDLPAFIIRRLPVRYTYDNNYFNDTYQGIPIGGYTQIVEKMLAHPEITVETNTDFFAHKAEYLAQYPKVVFTGMIDQFFEYQLGELAYRSLRFETETVPVDNYQGNAVVNYTDAETPYTRVIEHKHFEFGKGDADQTVITREFPANWQRGDEPYYPVNNQTNNTLYKQYAKLAAAEPQVIFGGRLGQYRYYDMHQVIHAALVTVASEFATTK

SEQ ID NO: 786 - protein, 225 aa, Lactiplantibacillus plantarum
  source 1..225: note = CS00007_Sugar transferase
MKQVEINETVKVGHIQPQTNYQFLTMIGRPVTGWKLVVKRVFDLIVGLVGTVLSSPIVLIFAILVKLTSKGPAFYKQERVGLMGKSFNVIKLRSMYQNAEARTGAVWAQKNDPRITPVGRFMRKTRVDELPQFWNVLKGDMSLVGPRPERPVLTEEFSQQFADFPKRLRIIPGITGYAQINGGYDITPDAKCKLDNYYIEHFSVWFDIKMLLGTVKIVFTGDGAR

SEQ ID NO: 787 - protein, 242 aa, Lactiplantibacillus plantarum
  source 1..242: note = CS00007_exopolysaccharide biosynthesis protein
MFKRKEQNTTTTAPINLTAINEPMSVITEQIKTIRTNINFAASDRKLRTLMVTSAMLGEGRSTVSGNLAVEYAKEGMQVLLVDADLRRPTIHKTFGLKNQKGLSSWLGNQLEDVNDAIHPVIGNLFVMTSGPKPPNPAELLGSNKMTEFLTSATRKLDLVIVDAPPILPVTDSQLLANKVDGTVLVVRQGVAQKAAVRDAVRSLKKSHANILGSVLNDVRDSSHHGYYGYDNGYGYYSNEDK

SEQ ID NO: 788 - protein, 256 aa, Lactiplantibacillus plantarum
  source 1..256: note = CS00007_exopolysaccharide biosynthesis protein
MMDQAVSFDFFIRLVRKYWRAIIGFTVAGLIVAAGLTFFVITPKYQSSVQILVNRKNTNAATEYAGQQADVQMITTYKELIAGQVVLKPAKQQLSKRFGIERSLNTLKSEVSVTSTTNSQVFSIAVTDADAKASATIANQIARSFKNQVKKIIKVNNVTIVAPAETPKSAVSPKKPLNLLIGLVAGLLLGIVYAAVRMLTDRRVHDVDFLTDDLGLTSLGLVNHQHQHSMKKQVLNLNGGYRPHNDRTNSQAMKRV

SEQ ID NO: 789 - protein, 372 aa, Lactiplantibacillus plantarum
  source 1..372: note = CS00007_UDP-galactopyranose mutase
MSKYDYLVVGAGLFGAVFAHEAALRGKHVKVIEKRDHIAGNIYTKEVDGIQVHQYGAHIFHTSDKQIWEYVNQFAEFNRYTNSPVANYKGHMYNLPFNMNTFSELWGVRTPAEAQAKIQEQKDAAQLSGEPKNLEEQAISLIGTDIYEKLIKGYTEKQWGQKATDLPAFIIRRLPVRYTYDNNYFNDTYQGIPIGGYTQIVEKMLDHPEIDVETGVDFFAHKDQYLADYPKIVFTGMIDQYFDYQLGELEYRSLRFETEERDVDNYQGNAVINYTDAETPYTRIIEHKHFEFGKGDKGKTIITREYPANWKRGDEPYYPVNNTRNNTLYKQYAELAKQEGNVIFGGRLGQYRYYDMHQVIHAALVTVNGEFA

SEQ ID NO: 790 - protein, 502 aa, Lactiplantibacillus plantarum
  source 1..502: note = CS00007_Poly(Glycerol-phosphate) alpha-glucosyltransferase
MFYFINEYILGKNSSVEHAAINRVKLFNHYKAPAQIVTKMYDRLLHQTMGTFQLANQQVLNMFDYFQQTTDVPTKVLHTDDMHLPVEYAVEVGANFSKIFNGDEHVSNVGFIPGTIGRVFYQEFFDNQGNLSSTDLWDWRGFKSSTQYFGQNGKLVLERFYNLQGETVIEQYYVPDTNGNPLASRLILKNYRDQAERFFQDANHLFRFFLAELSHLDKQTTTFISDRPGTSVKPLLELQDDSHKYVTVPIYQAKDINDPIHSPLDGFLTPAFDNLQHFDGFITATESQAQHLRTRFPKAKVTVLPTVTTSPLAQSKLQPITARPKQLLYVGRLAPDRQLDQLIRTIALVKQQVKEIQCDFYGYGDPEYLKTLNKLVEELKLTNNVHLLDYHPDLETRYDDYQLLLNTDIVDGGPMSMPEAMSHGIPVISYRFNYGPKDWIDDGHDGFIVDPGNQLALRDRVIELMTDTKKLTAFSEAAFKKLHTSQTDLKVWHRWQQLLGIK

SEQ ID NO: 791 - protein, 202 aa, Lactiplantibacillus plantarum
  source 1..202: note = CS00007_Flavin prenyltransferase LpdB
MNHNIINLQKRGDVVMKRIVVGITGASGTIYAVDLLEKLHQRPDVEVHLVMSAWAKKNLELETDYSLAQLTALADATYRANDQGAAIASGSFLNDGMVIVPASMKTVAGIAYGFGDNLISRAADVTIKEQRKLVIVPRETPLSVIHLENLTKLAKLGAQIIPPIPAFYNHPQSIQDLVNHQTMKILDAFHIHNETDRRWEGD

SEQ ID NO: 792 - protein, 174 aa, Lactobacillus acidophilus
  source 1..174: note = CS00008_UDP-galactopyranose mutase
MVENMLGDPDITVKLNTDFFDNKDDYLKNFDKIIYTGMIDKFFDYKLGELEYRSLRFETEEKDVNNYQGNAVINYTEAEIPYTRVIEHKHFEFGKGDNDKTIITREYPADWKRGDEPYYPINNKRNNDLYAKYAELAKKQDKVIFGGRLGQYKYYNMDQVIAAALDTVNSEFGD

SEQ ID NO: 793 - protein, 133 aa, Lactobacillus acidophilus
  source 1..133: note = CS00008_UDP-galactopyranose mutase
MKTYLVVGSGLFAAVFAHEAAKRGNKVKVIEKRDHIAGNIYTKEIDGIQVHKYGAHIFHTSNKKVWDYVHQFADFNRYTNSPVANYKGHMYNLPFNMNTFSEMWGVRTPQEAMAKINEQRQEMAGKEPQNLEE

SEQ ID NO: 794 - protein, 330 aa, Lactobacillus acidophilus
  source 1..330: note = CS00008_UDP-glucose 4-epimerase
MKVLVVGGAGYIGSHAVRELVKEGNDVVVLDSLYTGHRKAVDPKAKFYQGDIEDTFLVSKILRDEKIDAVMHFAAYSLVPESVKKPLKYYDNNVSGMISLLKAMNDADVKYLVFSSSAATYGIPKKLPITEDTPLDPINPYGETKMMMEKIMAWADKADGIKYTALRYFNVAGASSDGTIGEDHGPETHLIPNILKSAISGDGKFTIFGDDYNTKDGTNVRDYVQVEDLIDAHILALKHMMKTNKSDVFNLGTAQGYSNLEILESAKKVTGIDIPYTMGPRRGGDPDSLVADSTKARTILGWKPKHENVDEVIETAWKWHKSHPKGYEDK

SEQ ID NO: 795 - protein, 325 aa, Lactobacillus rhamnosus
  source 1..325: note = CS00010_Phosphate acetyltransferase
MDLFESLKDKINGKHLRIVFPEGEDPRVLGAAVRLAADGLVQAIVLGNPDKIQSLAAEKSWDLSKLTVRDPEHDELHDQMVTAFVERRKGKATQEQAEKIVQNANYFGTMLVYMKKADGMVSGAVHSTADTVRPALQIIKTRPGVHLVSGAFIMQRGRDERYLFADNAINIDPDADQLAEIAVESAKTAALFDIEPPRVALLSFSTKGSAKGPQVDKVVEATKKAHELAPDLALDGELQFDAAFVPTVAKQKAPDSKVAGEANVFIFPELQSGNIGYKIAQRFGGFEAIGPILQGLNQPVSDLSRGANEEDVYKLAIITAAQTLL

SEQ ID NO: 796 - protein, 290 aa, Lactobacillus rhamnosus
  source 1..290: note = CS00010_Glucose-1-phosphate thymidylyltransferase
MKGIILAGGSGTRLYPITEAISKQLVPVYDKPMIYYPLSTMMLAGIRDILVISTPRDIDRFEDLLKDGKQLGLNISYKVQDKPNGLAEAFIVGADFIGDDSVCLILGDNIFYGSGLSKLVQRSAAKTTGATVFGYQVNDPERFGVVAFDKQHHVQSIVEKPEHPESNFAVTGMYFYDNQVVEIAKNLKPSPRGELEITDVNKAYLERGQLDVELLGRGFAWLDTGTHESLHEAASFIETVQKRQNLKIACLEEVAYRMGYIDRDQLRELAQPLKKNDYGQYILRLADEEA

SEQ ID NO: 797 - protein, 190 aa, Lactobacillus rhamnosus
  source 1..190: note = CS00010_dTDP-4-dehydrorhamnose 3,5-epimerase
MSLKVIPTKLKDVKLVETDVFGDNRGFFTETYTREKFVEAGIKNDFNQDNQSLSAEAGVLRGMHYQMAPYAQTKLVRVVTGVVEDVLVDIRKGSPTYGHWEGYILSQYNHRQLLVPKGFAHGFITLTPNVNFVYKVEGYYAPEADRGIAFDDPDIGIDWPMSTAHLIMSEKDQHHPQLKDAENNFIYGEI

SEQ ID NO: 798 - protein, 241 aa, Lactobacillus rhamnosus
  source 1..241: note = CS00010_Lysozyme M1
MRRRRVIYANTYQHRRRLWFLLISAGVVAALVIGWWLLRNPRPDPTAYPVLGVRLDQTDGVQDFDRLRSSRVSFVYLKATEGSSYFDDNFNTNFTQAAGSRVSIGVYHVFSFETTPQAQATQFIRKVGSNIGDLPIGIYLSYYREQKPSSSWLTQHLTEFITFIQQRYHRQVLLMGSPDILKVVKTVVPQAPRWTITDKRPANNGGFWQYTDGARLPDGPQASYRAAVFMGKRGTFLKLAQ

SEQ ID NO: 799 - protein, 331 aa, Lactobacillus rhamnosus
  source 1..331: note = CS00010_UDP-glucose 4-epimerase
MTIAVLGGAGYIGSHTVKQLLADGEDVIVLDNLITGHRKAVDPRARFYQGDIRDYHFLSQVFSQEKIDGIVHFAAFSIVPESMKDPLKYFDNNTGGMITLLEAMNQFGIKKIVFSSTAATYGEPKQVPIKETDPQVPTNPYGESKLAMEKIMHWADVAYGLKYVALRYFNVAGAMPDGSIGEDHHPETHLIPIILQVAAGTRTGLQIYGDDYPTKDGTNVRDYVHVVDLADAHVLALKYLNAGNPSSAFNIGSAHGFSNMEILNAARKVTGQKIPATVGPRRAGDPSTLVASSEKARDILGWKPNYDDIDKIIETAWNWHENHPEGFGDRN

SEQ ID NO: 800 - protein, 211 aa, Lactobacillus rhamnosus
  source 1..211: note = CS00010_N-acetylmuramoyl-L-alanine amidase
MAKKRRRFTLKKVPLAAWLVIAFFAVGSMLVVSSYWSQRQAEVSQRQAIVDKKAAEKAKKEAFIKRLVPTAQAMQKQYGVLTSITLSQAILESDWGTSTLAKDYHNLFGIKGTDPATTKVLRTKEYVNDKWITVNGRFRVYSDDAASIRDHALLFVNGTDWNPQQYATVRAAKDYKTAASALQTDGYATDPDYPQKLIHLIEAWNLTQYDN

SEQ ID NO: 801 - protein, 190 aa, Lactobacillus rhamnosus
  source 1..190: note = CS00010_Flavin prenyltransferase LpdB
MKRIIVGITGASGTIYAVNLLQHLHRLPDVEVHLVMSAWAKQNLSLETDMKQSELEALADYVYPVQNQGATIASGSFLTDAMVIVPASMKTIAGIAMGFDDNLIGRAADVTIKEQRQLIIVPRETPLSPIHLDNLAKLAHIGVQIIPPIPAFYQHPQTIQDLIEHHTMKLLDALHIKTETASRWNGASLR

SEQ ID NO: 802 - protein, 325 aa, Lactobacillus paracasei
  source 1..325: note = CS00017_Phosphate acetyltransferase
MDLFESLKDKIDGKNLRIVFPEGEDPRVLGAAVRLAADGLIQAIVLGNPDKIQTLAAAKSWDLSKLTVRDPANDDIHAKMVAAFVERRKGKATPEQAEKIVQDANYFGTMLVYMKEADGMVSGAVHSTADTVRPALQIIKTRPGVHLVSGAFIMQRGRDERYLFADNAINIDPDADQLAEIAVESAKTAALFDIEPPRVALLSFSTKGSAKGPQVDKVVEATKKAHELAPDLALDGELQFDAAFVPSVAKQKAPDSKVAGEANVFIFPELQSGNIGYKIAQRFGGFEAIGPILQGLNQPVSDLSRGANEEDVYKLAIITAAQTLL

SEQ ID NO: 803 - protein, 245 aa, Lactobacillus paracasei
  source 1..245: note = CS00017_Lysozyme M1
MRSRVIYADTYRKRHQRRLFLLAVLIIALGALFVWWHQRNPRPDPQTYPVLGVRLDQTDGVQDFDSLRSSKVSFVYLKATEGSSYFDDNFNTNFNQAAGSRLSIGIYHVFSFETTPQAQADQFTRQVGQNIGDLPIGIYLSYYTEKKPSTQWLTTHLQTFVTLVQQHYHRQVLLMGSPSILKAVQKVDPQAPRWVVSDKKPTTSSGFWQYTSGARLPNGPHADYRAAVFMGDRAAFLKLSQQIVN

SEQ ID NO: 804 - protein, 331 aa, Lactobacillus paracasei
  source 1..331: note = CS00017_UDP-glucose 4-epimerase
MTIAVLGGAGYIGSHTVKQLLAAGEDVVVLDNLITGHRKAVDPRARFYQGDIRDYHFLSQVFSQEKIDGIVHFAAFSIVPESMKDPLKYFDNNTGGMITLLEAMNQFGIKKIVFSSTAATYGEPKQVPIKETDPQVPTNPYGESKLAMEKIMHWADVAYGLKFVALRYFNVAGAMPDGSIGEDHHPETHIVPIILQVAAGTRTGLQIYGDDYPTKDGTNVRDYVHVVDLADAHILALKYLDAGNKSSAFNIGSAHGFSNLEILNAARKVTGQEIPATMGPRRAGDPSTLIASSEKARDILGWKPNYDDIDKIIETAWNWHENHPEGFGDRN

SEQ ID NO: 805 - protein, 211 aa, Lactobacillus paracasei
  source 1..211: note = CS00017_N-acetylmuramoyl-L-alanine amidase
MAKRRRHFTLKIIPLAAWLVIGFFAIGVTLVVGSYWAQQQTEVTQKQEVADEKAAVRAKKVAFIKRLVPTAQAMQKQYGVLTSITLAQAILESNWGTSALAKDYHNLFGIKGTDPATTKVLRTQEYVNDKWITVDGRFRVYDNDSESIRDHALLFVNGTDWNPQQYATVRAAKDYKTAAAALKTDGYATDPDYPQKLIHLIETWNLTQYDS

SEQ ID NO: 806 - protein, 190 aa, Lactobacillus paracasei
  source 1..190: note = CS00017_dTDP-4-dehydrorhamnose 3,5-epimerase
MSLKVIPTKLQDVKLVETDVFGDNRGFFTETYTRDKFVAAGITNDFNQDNQSLSAEAGVLRGMHYQMAPDAQTKLVRVVTGVVEDVLVDIRKGSPTYGQWEGYILSEFNHRQLFVPKGFAHGFITLTPNVNFCYKVEGFYAPQSDRGIAFDDPDIGIQWPMSTDHLIMSDKDKKHPQLKDAENNFVYGEI

SEQ ID NO: 807 - protein, 361 aa, Bacillus coagulans
  source 1..361: note = CS00020_Endo-1,4-beta-glucanase
MAKLDETLSMLKDLTDAKGIAGNEAEVRAVVKKYIEPYADELDTDGLGSLIAKKTGQADGPKIMIAGHMDEVGFMVTQIDESGFLRFQTIGGWWSQVMLAQRVTVVTDKGDVTGVIGSKPPHILSPDARKKSYEIKDMFIDIGATSREEALEWGVKPGDMVVPYFEFTVMKNEKMLLAKAWDNRIGCAVVIDVLKNLHKENHPNIVYGVTNVQEEVGLRGAKTAASKVKPDIAFALDVGIAGDTPGISEKEALSKMGKGPQIVIYDASMVAHKGLRDTVVKVAEELNIPYQFESIPGGGTDAGSIHLTGSGIPSLAITIATRYIHSHAGILHRDDYENTVKLITEVIKRLDRKTVNHIIFD

SEQ ID NO: 808 - protein, 396 aa, Bacillus coagulans
  source 1..396: note = CS00020_Acetate kinase
MAKIMAINAGSSSLKFQLFEMPNESVITKGLIERIGLNDALFSITVNGDRVKEITDIPNHEIAVQFLLKKLTETGIIRSLDEIEGVGHRVVHGGEIFNDSAVVNDQVLAQIEDLAELAPLHNRANATGIRAFRAVLPDVVQVAVFDTAFHQTMPESAFLYSLPYAYYEKYRIRKYGFHGTSHKYVAMRAAELLGRPIEQLRLISCHLGNGASIAAIQGGRSIDTSMGFTPLAGVTMGTRSGNIDPALIPFIMEKTGKTAEEVLEVLNKESGLLGISGVSSDLRDIQVAAELERNKRAELALDIFASRIHKYIGSYAAKMAGVDAIIFTAGIGENSDAIRARILTGLEFMGIYWDPTLNQIRGTEAFINYPHSPVKVLVIPTNEELMIARDVVRLSS

SEQ ID NO: 809 - protein, 323 aa, Bacillus coagulans
  source 1..323: note = CS00020_Phosphate acetyltransferase
MSTFFDGIKEKVRGHNKTIVFPESSDERVLTAVSRFAADEVLRPVLIGNKDKIQAKAQAIGVSVKGVTVYDPEDYAGFEEMVQAFVERRKGKATEEDARQILKDVNYFGTMLVYLKKADGLVSGAIHSTADTVRPALQIIKTKPGVKKVSGVFIMVRGEEKFVFADCAINISPDSQDLAETAVESAKTARTFDIEPRIAMLSFSTKGSAHSDETEKVAQAVRLAKERDPELVMDGEMQFDAAYVPAVAQKKAPDSVIQGNATVFIFPNLDAGNIGYKMAQRLGGFEAVGPILQGLNAPVNDLSRGCNAEDVYHLALISAAQSL

SEQ ID NO: 810 - protein, 331 aa, Bacillus coagulans
  source 1..331: note = CS00020_UDP-glucose 4-epimerase
MSILVLGGAGYIGSHAVYQLIDQKYDVVVIDNLQTGHRAAIHPKAKFYEGDIRDRAFMQEVFGKEKIDAIIHFAANSLVGESMEQPLKYFDNNVYGTQIVLEMMKEFHVPHIVFSSTAATYGEPERVPITETMPTVPTNTYGETKLTMEKMMKWCEKAYGIKYVALRYFNVAGARSTGEIGEDHHPETHLIPVVLETVLGKREAITIFGEDYDTKDGTCVRDYIHVEDLIDAHILALQYLQNGGASDVFNLGSSNGFSVKEIVDTVREVTGKGFNVKIGDRRAGDPSTLIASSEKAKRVLGWNPQKTDIRQIIKDAWNWHESHPNGYDDRR

SEQ ID NO: 811 - protein, 403 aa, Exiguobacterium sp.
  source 1..403: note = SBI00449_Acetate kinase
MAKIMAVNAGSSSLKFQLLEMPNETMIAVGLVERVGKDDAIFTIKYGEGQKYTDVLPLATHKEAVELSLEKLMEFGIISSYDEIKGVGHRVLHGKEKYADSVLITDEVMHDIESYTELGPLHIPPNLIGIRAFQALLPEVPQVAVFDTAFHQTMPEENFLYSLPYDYYTEYGIRKYGFHGTSHKYVTERASELLGRPLKDLRLISCHLGSGASIAAVSGGESIDTTMGFTPLEGITMGTRSGSLDPALIPFLMEKTGKTAEDVLNVMNKESGIYGLSGLSSDLRDVQTAAKEGNHRSEMALRIFANRIHGYIGQYAAEMNGVDAIIFTAGVGENSDSIRERVLRGLEFMGVYWDPSLNTGARGEELFINYPHSPVKVIIIPTNEELMIARDTVRVGGLVAQNA

SEQ ID NO: 812 - protein, 328 aa, Exiguobacterium sp.
  source 1..328: note = SBI00449_Phosphate acetyltransferase
MQLFDMLEQKIKAQQPKIVFPEGIDARVLGAAVRLKKDGLVTPVVIGPRVQIEETATANGIDVTGLDTIDPASYAGIDELVASFVERRKGKATEEQARAVILKDVNTFGTMLVHTGQAEGLVSGAMHATGDTVRPALQIIKMQEGYKKTSGVFIMVRDEEQYVFADCAINIAPDANDLAENAIASAKTAKTFGIDPKVALLSFSTKGSAKSPETERVVEATRIAKERAPELAIDGELQFDAAFVPSVAKSKAPESDVAGQANVFIFPSLEAGNIGYKIAQRLGGFEAIGPILQGLNKPVNDLSRGCNEEDVYKLAIITAAQAVEERQA

SEQ ID NO: 813 - protein, 332 aa, Exiguobacterium sp.
  source 1..332: note = SBI00449_UDP-glucose 4-epimerase
MATLVVGGAGYIGSHAVYQLIDAGKDVVVIDHLQSGHREAVHPQARLYEGDIRDRAFLDRVFTEETIEQVVHFAAFSLVGESMTEPLRYFDNNVYGTQVLLEAMTAHDIKQIVFSSTAATYGEQEQMPILETAETRPTNAYGETKLMMEKMMRWSEQAYGLRYVALRYFNVAGARATGEIGEDHTPETHLIPLVLEVANRQRAEISIYGDDYPTPDGTCIRDYIHVEDLIDAHIRALDYLANGNDSTVFNLGSSQGFSVREIIEAARRVTGHPIPERIIERRAGDPSILIAGSAKAKEVLGWTPQRTDIETIIRDAWNWHAHNPEGYRTSVR

SEQ ID NO: 814 - protein, 362 aa, Bacillus safensis
  source 1..362: note = SBI00461_Endo-1,4-beta-glucanase
MTKLDQTLTMLKDLTDAKGIPGNERDVKKVMQTYIESYADEVSTDRLGSLIAKKEGNANGPKIMLAGHLDEVGFMVTKIDDKGYIRFQTVGGWWSQVMLAQRVTIVTKKGEITGVIGSKPPHVLSPEARKKSIEITDMFIDIGASSKEQAMEWGVLPGDQIVPYFEFTVMNDEKMLLAKAWDNRIGCAVAIDVMKNLHNAQHENIAYSVATVQEEVGLRGAKTAAATIQPDIGFAIDVGVAGDTPGITEKEATSKLGKGPTIVVFDASMVSHKGLRDFVVQTADELNIPYQYDSMPGGGTDAGGIHLTGHGVPSLSIGIPSRYIHTHAAMIHRDDYENAVKLLTEVIKRLDQKTVEQITYGS

SEQ ID NO: 815 - protein, 323 aa, Bacillus safensis
  source 1..323: note = SBI00461_Phosphate acetyltransferase
MADIFSTVQEKVAGKGVKIVFPEGMDERILTAVQKLADGKVLQPIVVGKKQEVEAKAKELGLTLDGVDVYDPHTYEGFEELVQAFVERRKGKATEEQARKALLDENYFGTMLVYKGLADGLVSGAAHSTADTVRPALQIIKTKEGVKKTSGVFIMARGEEQYVFADCAINIAPDSQDLAEIAIESANTAKMFDIEPRVAMLSFSTKGSAKSDETEKVSEAVRIAKEKAPELVLDGEFQFDAAFVPSVAAKKAPDSVIKGDASVFVFPSLEAGNIGYKIAQRLGNFEAVGPILQGLNQPVNDLSRGCNAEDVYNLALITAAQAL

SEQ ID NO: 816 - protein, 394 aa, Bacillus safensis
  source 1..394: note = SBI00461_Acetate kinase
MSKIIAINAGSSSLKFQLFDMPEENVLTKGLVERIGMDNSIFTISVDGEKKTEVTDIPDHAVAVKMLLEKLTEFHIIKDFNEIDGVGHRVVHGGEKFSDSVLLTDEVINDIDQLSELAPLHNPANVVGIKAFKQILPDVPAVAVFDTAFHQTMPEQSYLYSLPYDYYKNFGIRKYGFHGTSHKFVTERAAELLGRPLEELRLISCHLGNGASIAAVEGGKSIDTSMGFTPLAGVAMGTRSGNIDPALIPFIMEKTGHTAEEVLSTLNKKSGLLGVSGLSSDLRDIEVATEEGNDRAEVALDIFASRIHKYIGSYAARMNGVDAIIFTAGIGENSSEVRARVLRGLEFMGVYWDPSLNNMRGEEAFISYPHSPVKVIVIPTNEEVMIARDVMRLA

SEQ ID NO: 817 - protein, 330 aa, Bacillus safensis
  source 1..330: note = SBI00461_UDP-glucose 4-epimerase
MTILVCGGAGYIGSHAVAALLAKGEQVVVVDNLQTGHKEAVLEGAVLEEGDLRDQDFLRQVFKTHQIEAVMHFAADSLVGESVTDPLKYYDNNVGGAIALLQVMNEFDVKHIVFSSTAATYGEPKRVPIVETDETNPTNPYGETKLAIEKMLKWSEQAYGMKYVVLRYFNVAGAHTEGLVGEDHQPETHLIPIILQVALGKRDQIMIYGDDYETEDGTCIRDYIHVMDLVDAHILAVDRLRAGKGSATYNLGNGTGFSVKQVVDAVRNVTGHAIPAQVADRRAGDPAKLIASSEKALQELGWTPQYADLHTIIQSAWDWFQKHPDGYQSK

SEQ ID NO: 818 - protein, 361 aa, Bacillus atrophaeus
  source 1..361: note = SBI00550_Endo-1,4-beta-glucanase
MAKLDETLTMLKELTDAKGIPGNEREVRQVMKSYIEPFADDVTTDRLGSLIAKKTGLENGPKIMVAGHLDEVGFMVTQISDKGFLRFQTVGGWWSQVMLAQRVTVVTKKGDITGVIGSKPPHILPPEARKKPVEIKDMFIDIGASSREEAMEWGVLPGDQVVPYFEFTVMNNEKHLLAKAWDNRIGCAIAIDVLKGLQNSDHPNVVYGVGTVQEEVGLRGAKTAAHAIQPDIAFGVDVGIAGDTPGISEKEAQSKMGKGPQIMLYDASMISHKGLRDFVVNTAEEAGIPYQFESLSGGGTDSGSIHLTANGVPALSITIASRYIHTHAAMLHRDDYENAVKLITEVIKKLDRKTVDQITYQ

SEQ ID NO: 819 - protein, 395 aa, Bacillus atrophaeus
  source 1..395: note = SBI00550_Acetate kinase
MSKIIAINAGSSSLKFQLFEMPSEKVLTKGLVERIGIADSVFTISVNGEKNTEVTDIPDHAVAVKMLLNKLTEFGIIKDLNEIDGIGHRVVHGGEKFSDSVLLTDEMINEIEKISELAPLHNPANIVGIKAFKEVLPNVPAVAVFDTAFHQTMPEQSYLYSLPYEYYEKFGIRKYGFHGTSHKYVTERAAELLGRPLEDLRLISCHLGNGASIAAVEGGKSIDTSMGFTPLAGVAMGTRSGNIDPALIPYIMEKTGQSADEVLNTLNKKSGLLGISGFSSDLRDIVEASKEGNERAETALEVFASRIHKYIGSYAARMSGVDAIIFTAGIGENSVEVRERVLRGLEFMGVYWDPALNNVRGEEAFISYPHSPVKVIIIPTDEEVMIARDVVRLAQ

SEQ ID NO: 820 - protein, 323 aa, Bacillus atrophaeus
  source 1..323: note = SBI00550_Phosphate acetyltransferase
MADLFSTVQEKVAGKGVKIVFPEGLDERILIAVNNLAGNKVLQPIVIGSENEIQAKAKELNLTLEGVDIYDPHTYEGMEDLVQAFVERRKGKATEEQARKALLDENYFGTMLVYKGLAHGLVSGAAHSTADTVRPALQIIKTKEGVKKTSGVFIMARGDEQYVFADCAINIAPDSQDLAEIAIESANTAKMFNIEPRVAMLSFSTKGSAKSDETEKVAEAVKIAKEKAPELTLDGEFQFDAAFVPSVAEKKAPDSEIKGDANVFVFPSLEAGNIGYKIAQRLGNFEAVGPILQGLNMPVNDLSRGCNAEDVYNLALITAVQAL

SEQ ID NO: 821 - protein, 473 aa, Bacillus atrophaeus
  source 1..473: note = SBI00550_3-polyprenyl-4-hydroxybenzoate decarboxylase
MAYQDFREFLAALEKEGQLLKVDEKVKPEPDLGAAARAANNLGDKSPALLFNNIYGYNNAQIAMNVIGSWPNHAMMLGLPKDTPVKEQFFEFAKRYEQFPMPVKREETAPFHENEITEDINLFDILPLFRINQGDGGYYLDKACVISRDLDDPDNFGKQNVGIYRMQVKGKDRLGIQPVPQHDIAIHLRQAEERGVNLPVTIALGCEPVITTAASTPLLYDQSEYEMAGAIQGEPYRIVKSKLSDLDIPWGAEVVLEGEIIAGEREYEGPFGEFTGHYSGGRSMPIIKIKRVSHRNHPIFEHLYLGMPWTECDYMIGINTCVPLYQQLKEAYPSEIVAVNAMYTHGLIAIVSTKTRYGGFAKAVGMRALTTPHGLGYCKMVIVVDEDVDPFNLPQVMWALSTKMHPKHDAVTIPDLSVLPLDPGSDPSGITHKMILDATTPVAPETRGHYSQPLDSPLTTKEWEQKLMDLMNK

SEQ ID NO: 822 - protein, 445 aa, Bacillus atrophaeus
  source 1..445: note = SBI00550_Putative aldehyde dehydrogenase
MDQQLKIDIQRVFQLQKNNQKALRASTAEQRREKLNRLLEAVVAHEEDIIEAIRKDVRKPYHEVKKAETAGTIKAIKDNMDNLEKWMAPKEVGSSLHPDANGILMYEPKGVTLILGPWNYPFMLTMAPLAASIAAGNSAIVKLSDFTMNTSHIAAKVIREAFDEKEVAIFEGEVEVATELLDQPFDHIFFTGSTNVGKIVMTAAAKHLASVTLELGGKSPTIIDSEYDMLDAAKKIAVGKFVNAGQTCIAPDYIFIKKDVQDQFAGLLQTIVNSGFMEDDHTVDRNKFTQIVNDRNFYRVKDLFDDAISKGAEVVFGGTFDASDRTISPTVLKNVTPDMKIMQEEIFAPILPLMNYEDIDEVIDYITDRDKPLALYVFSHNQELIDNVLQHTTSGNAAVNDVVVHFSDVNLPFGGVNTSGIGSYHGVYGFKEFSHEKGVFIQAAK

SEQ ID NO: 823 - protein, 361 aa, Bacillus subtilis
  source 1..361: note = SBI00553_Endo-1,4-beta-glucanase
MAKLDETLTMLKDLTDAKGIPGNEREVRQVMKSYIEPFADEVTTDRLGSLIAKKTGVQNGPKIMIAGHLDEVGFMVTQITDKGFIRFQTVGGWWAQVMLAQRVTIVTKKGEITGVIGSKPPHILSPEARKKSVEIKDMFIDIGASSREEALEWGVIPGDMIVPHFEFTVMNNEKFLLAKAWDNRIGCAIAIDVLRNLQNTDHPNIVYGVGTVQEEVGLRGAKTAAHTIQPDIAFGVDVGIAGDTPGISEKEAQSKMGKGPQIIVYDASMVSHKGLRDVVVATAEEAGIPYQFDAIAGGGTDSGAIHLTANGVPALSITIATRYIHTHAAMLHRDDYENAVKLITEVIKKLDRKTVDQITYE

SEQ ID NO: 824 - protein, 323 aa, Bacillus subtilis
  source 1..323: note = SBI00553_Phosphate acetyltransferase
MADLFSTVQEKVAGKDVKIVFPEGLDERILEAVSKLAGNKVLNPIVIGNENEIQTKAKELNLTLDGVEIYDPHTYEGMEDLVQAFVERRKGKATEEQARKALLDENYFGTMLVYKGLAQGLVSGAAHSTADTVRPALQIIKTKEGVKKTSGVFIMARGEEQYVFADCAINIAPDSQDLAEIAIESANTAKMFDIEPRVAMLSFSTKGSAKSDETEKVADAVKIAKEKAPELTLDGEFQFDAAFVPSVAEKKAPDSEIKGDANVFVFPSLEAGNIGYKIAQRLGNFEAVGPILQGLNMPVNDLSRGCNAEDVYNLALITAAQAL

SEQ ID NO: 825 - protein, 395 aa, Bacillus subtilis; identical to SEQ ID NO: 770
  source 1..395: note = SBI00553_Acetate kinase

SEQ ID NO: 826 - protein, 445 aa, Bacillus subtilis
  source 1..445: note = SBI00553_Putative aldehyde dehydrogenase
MEQQVKDDIQRVFQLQKKQQKALRASTAEQRIEKLQRFLDSVIAHEEEIIEAIRKDVRKPYHEVKKAEIEGTKKAIRDNMNNLEQWMAPKEVGSSLSPDANGILMYEPKGVTLILGPWNYPFMLTMAPLAASLAAGNSAIVKLSDFTMNTSNIAAKVIRDAFDEKEVAIFEGEVEVATELLDQPFDHIFFTGSTNVGKIVMTAAAKHLASVTLELGGKSPTIIDSEYDLTDAAKKIAVGKFVNAGQTCIAPDYLFIKKDVQDRFAGILQTIVNAGFMEDDYNPDRSKFTQIVNDRNFNRVKDLFDDAIEKGAEVVFGGVFDDSDRTISPTVLKNVTPDMKIMQEEIFAPILPMMNYEDIDEVIDYVNDRDKPLALYVFSHNQDLIDNVLQHTTSGNAAINDVVVHFSDVNLPFGGVNTSGIGSYHGVYGFKEFSHEKGVFIQAAK

SEQ ID NO: 827 - protein, 473 aa, Bacillus subtilis
  source 1..473: note = SBI00553_3-polyprenyl-4-hydroxybenzoate decarboxylase
MAYQDFREFLAALEKEGQLLTVNEEVKPEPDIGAAARAASNLGDKSPALLFNNIYGYHNAQIAMNVIGSWPNHAMMLGMPKDTPVKEQFFEFAKRYDQFPMPVKREESAPFHENEITEDINLFDILPLFRINQGDGGYYLDKACVISRDLEDPENFGKQNVGIYRMQVKGKDRLGIQPVPQHDIAIHLRQAEERGINLPVTIALGCEPVITTAASTPLLYDQSEYEMAGAIQGEPYRIVKSKLSDLDVPWGAEVVLEGEIIAGEREYEGPFGEFTGHYSGGRSMPIIKIKRVYHRNNPIFEHLYLGMPWTECDYMIGINTCVPLYQQLKEAYPNEIVAVNAMYTHGLIAIVSTKTRYGGFAKAVGMRALTTPHGLGYCKMVIVVDEDVDPFNLPQVMWALSTKMHPKHDAVIIPDLSVLPLDPGSNPSGITHKMILDATTPVAPETRGHYSQPLDSPLTTKEWEQKLMDLMNK

SEQ ID NO: 828 - protein, 464 aa, Paenibacillus sp.
  source 1..464: note = SBI00556_Tryptophanase
MARFAEPFKIKMVEPLNMISREEREKALERAGYNPFLLRGDEVYIDLLTDSGTTAMSDNQWAGLMLGDESYAGSRNYYHLCDAVQQITGYQHVIPMHQGRGAEKVLFPLLIQKGQYVLSNWHFDTTRAHVDLAGGIAVDLVTEQAYETTTPYPFKGNFDVDKLRHAIAEKGTENIAFILITVTNNSAGGQPVSMENIREVSAIAKQNGIRVFFDAARYAENAYFIKKREQGYEDKEIIDIVREMFSYGEGFTMSAKKDGLVNIGGLLAFKEDETLFTQARSMTVPMEGFPTYGGLTGRDMEALARGLHEGIDEQYLAYRIGQIEYLGRRLEEGGIPFQTPTGGHAVFVDAKKMLPHISAAQFPAQVLANELYLEAGIRGVEIGSFLLGRDAATGEQLESKLELLRLTIPRRVYTNNHMDVIADALIAIKDRAETLTGLEFTYEPPILRHFTARLRPVKTEALSH

SEQ ID NO: 829 - protein, 361 aa, Bacillus subtilis
  source 1..361: note = SBI00564_Endo-1,4-beta-glucanase
MAKLDETLTMLKDLTDAKGIPGNEREVRQVMKSYIEPFADEVTTDRLGSLIAKKTGAENGPKIMIAGHLDEVGFMVTQITDKGFIRFQTVGGWWAQVMLAQRVTIVTKKGEITGVIGSKPPHILSPEARKKSVEIKDMFIDIGASSREEALEWGVLPGDMIVPHFEFTVMNNEKFLLAKAWDNRIGCAIAIDVLRNLQNTDHPNIVYGVGTVQEEVGLRGAKTAAHTIQPDIAFGVDVGIAGDTPGISEKEAQSKMGKGPQIIVYDASMVSHKGLRDAVVATAEEAGIPYQFDAIAGGGTDSGAIHLTANGVPALSITIATRYIHTHAAMLHRDDYENAVKLITEVIKKLDRKTVDEITYQ

SEQ ID NO: 830 - protein, 395 aa, Bacillus subtilis; identical to SEQ ID NO: 770
  source 1..395: note = SBI00564_Acetate kinase

SEQ ID NO: 831 - protein, 323 aa, Bacillus subtilis; identical to SEQ ID NO: 771
  source 1..323: note = SBI00564_Phosphate acetyltransferase

SEQ ID NO: 832 - protein, 473 aa, Bacillus subtilis
  source 1..473: note = SBI00564_3-polyprenyl-4-hydroxybenzoate decarboxylase
MAYQDFREFLAALEKEGQLLTVNEEVKPEPDLGAAARAASNLGDKSPALLFNNIYGYHNARIAMNVIGSWPNHAMMLGMPKDTPVKEQFFEFAKRYDQFPMPVKREETAPFHENEITEDINLFDILPLFRINQGDGGYYLDKACVISRDLEDPDNFGKQNVGIYRMQVKGKDRLGIQPVPQHDIAIHLRQAEERGINLPVTIALGCEPVITTAASTPLLYDQSEYEMAGAIQGEPYRIVKSKLSDLDVPWGAEVVLEGEIIAGEREYEGPFGEFTGHYSGGRSMPIIKIKRVYHRNNPIFEHLYLGMPWTECDYMIGINTCVPLYQQLKEAYPNEIVAVNAMYTHGLIAIVSTKTRYGGFAKAVGMRALTTPHGLGYCKMVIVVDEDVDPFNLPQVMWALSTKMHPKHDAVIIPDLSVLPLDPGSNPSGITHKMILDATTPVAPETRGHYSQPLDSPLTTKEWEQKLMDLMNK

SEQ ID NO: 833 - protein, 445 aa, Bacillus subtilis
  source 1..445: note = SBI00564_Putative aldehyde dehydrogenase
MEQQVKDDIQRVFQLQKKQQKALRASTAEQRREKLQRFLDSVIAHEEEIIEAIRKDVRKPYHEVKKAEIEGTKKAIRDNMNNLEQWMAPKEVGSSLSPDANGILMYEPKGVTLILGPWNYPFMLTMAPLAASLAAGNSAIVKLSDFTMNTSNIAAKVIRDAFDEKEVAIFEGEVEVATELLDQPFDHIFFTGSTNVGKIVMTAAAKHLASVTLELGGKSPTIIDSEYDLMDAAKKIAVGKFVNAGQTCIAPDYLFIKKDVQDRFAGILQTVVNAGFMEDDHTPDRSKFTQIVNDRNFNRVKDLFDDAIERGAEVVFGGVFDASDRTISPTVLKNVTPDMKIMQEEIFASILPMMNYEDIDEVIDYVNDRDKPLALYVFSKNQDLIDNVLQHTTSGNAAINDVVVHFSDVNLPFGGVNTSGIGSYHGVYGFKEFSHEKGVFIQAAE

SEQ ID NO: 834 - protein, 362 aa, Psychrobacillus sp.
  source 1..362: note = SBI00568_Endo-1,4-beta-glucanase
MPKLDETLTMLKELTDAKGIPGNEREPREVMEKYIAPFADKIEYDNLGSLIAEKVGDANGPKIMVAGHLDEVGFMISKIDDKGFLSFQTVGGWWSQVMLAQRVTIVTRKGDNITGIIGSKPPHILSAEARKKAADVKDMFIDIGASSKEEAMEWGVLPGDMVVPYFEFSVMNNEKLLLAKAWDNRIGCAIAIDVLKALKDENHPNIVYGVGNVQEEVGLRGAKTTTNKIKPDIGFAVDVGVAGDTPGITAKESTSKMGDGPQIVLFDASMVSHKGLRDFVTDTADEHNIPYQFEMIPGGGTDAGSMHISVNGVPSLAIGVATRYIHSHAGILHRDDYENTVKLIVEVIKKLDRDTVNKITFD

SEQ ID NO: 835 - protein, 396 aa, Psychrobacillus sp.
  source 1..396: note = SBI00568_Acetate kinase
MPIILAINAGSSSLKFQVFEMVDEQVIAKGLIERIGLGNPIFTMTTNEERINIIEQVDNHEQAVKLLMNMLIEKKVIHSLDDIQGIGHRVVHGGEVYSDSVLITNEVLDTLEDLSELAPLHNPANITGIKVFKKELPDVPAVAVFDTAFHQTMPESSYLYSIPYDYYEKYGIRKYGFHGTSHKFVSERAAILLNRPLETTRFISCHLGNGASIAAIHHGKSIDTSMGFTPLAGVTMGTRSGNIDPALIPYLMEKTGKDAEDILDILNKKSGMLGVSGFSSDLRDIVGEAAKGNDRAQLALDVFANRIHKYIGSYAARMNGVDAIIFTAGIGENSEVIREKVLKGLQFMGVYMDPDLNKINGKEIFINYPHSPVKVIVIPTNEEIMIARDTMRIAKL

SEQ ID NO: 836 - protein, 314 aa, Psychrobacillus sp.
  source 1..314: note = SBI00568_Phosphate acetyltransferase
MANLFQEIKEKLRDANLSIILPEGKDERIIKAALKLQDEGIIRPIIIGNKEEIPSALTVINPQTYEEMDMLVAAFVERRKGKVTEEQAREILQDVNYFGTMLVYQEQANGLVSGAAHTTAETVRPALQIIKTKPGISKTSGAFIMVKEDVRYVFADCAITISPTSEDLAEIAVESAKTATAFGIEPKVAMLSFSTKGSAQSEETEKVVKATELAKQMDSSILIEGELQFDASIVPAIAAKKAPDAVVQGDATVFVFPSLEAGNIGYKIAQRLGGFEAIGPILQGLNAPVNDLSRGCSAEDVYKLAYITAAQALI

SEQ ID NO: 837 - protein, 299 aa, Psychrobacillus sp.
  source 1..299: note = SBI00568_Glucose-1-phosphate thymidylyltransferase
MKGIILAGGSGTRLYPLTRSVSKQLLPVFDKPMIYYPLSVLMLAGIKDILVISTPPDMPLFERLLGNGSELGISLSYKVQDKPEGLAQAFLIGEDFIGEDSVALILGDNIFFGQGFTPILQKVAARTVGATVFGYRVKDPERFGVVEFDKNLNAISIEEKPRHPRSDFAVTGLYFFDNQIVEIAKEIKPSSRGELEITDINKKYLERKKLKVELLGRGFAWLDTGTHDSLLEASLFIETIEKRQGFKVACLEEISYRMGYINRKQLLELAESLSKSSYGQYLIDIANEQKQFSWNVDGV

SEQ ID NO: 838 - protein, 361 aa, Bacillus axarquiensis
  source 1..361: note = SBI00589_Endo-1,4-beta-glucanase
MAKLDETLTMLKELTDAKGIPGNEREVRQVMKSYIEPFADEVTTDRLGSLIAKKTGAENGPKIMIAGHLDEVGFMVTQITDKGFIRFQTVGGWWSQVMLAQRVTIVTKKGEVTGVIGSKPPHILSAEARKKPVDIKEMFVDIGASSREEALEWGVLPGDMIVPHFEFTVMNNEKFLLAKAWDNRIGCAIAIDVLRNLKDTDHPNVVYGVGTVQEEVGLRGAKTSAHTIQPDIAFGVDVGIAGDTPGISEKEAQSKMGEGPQIILYDASMVSHKGLRDLVVNTAEEAGIPYQFDAIAGGGTDSGSIHLTANGVPALSITIATRYIHTHAAMLHRDDYENAVKLITEVIKKLDRQTVDDITYQ

SEQ ID NO: 839 - protein, 323 aa, Bacillus axarquiensis
  source 1..323: note = SBI00589_Phosphate acetyltransferase
MADLFSTVQEKVAGKGVKIVFPEGLDERILVAVSKLADNKVLNPIVIGNENEIQAKAKELNVTLDGVDIYDPHTYEGMEDLVQAFVERRKGKATEEQARKALLDENYFGTMLVYKGLAAGLVSGAAHSTADTVRPALQIIKTKEGVKKTSGVFIMARGDEQYVFADCAINIAPDSQDLAEIAIESANTAKMFDIDPRVAMLSFSTKGSAKSDETEKVADAVKIAKEKAPELTLDGEFQFDAAFVPSVAEKKAPDSEIKGDANVFVFPSLEAGNIGYKIAQRLGNFEAVGPILQGLNMPVNDLSRGCNAEDVYNLALITAAQAL

SEQ ID NO: 840 - protein, 395 aa, Bacillus axarquiensis
  source 1..395: note = SBI00589_Acetate kinase
MSKIIAINAGSSSLKFQLFEMPSETVLTKGLVERIGIADSVFTISVNGEKNTEVTDIPDHAVAVKMLLNKLTEFGIIKDLNEIDGIGHRVVHGGEKFSDSVLLTDETIQEIEDISELAPLHNPANIVGIKAFKEVLPNVPAVAVFDTAFHQTMPEQSYLYSLPYEYYEKFGIRKYGFHGTSHKYVTERAAELLGRPLKDLRLISCHLGNGASIAAVEGGKSIDTSMGFTPLAGVAMGTRSGNIDPALIPYIMEKTGQTADEVLNTLNKKSGLLGISGFSSDLRDIVEATKQGNERAETALEVFASRIHKYIGSYAARMSGVDAIIFTAGIGENSVEVRERVLRGLEFMGVYWDPALNNVRGEEAFISYPHSPVKVMIIPTDEEVMIARDVVRLAK

SEQ ID NO: 841 - protein, 445 aa, Bacillus axarquiensis
  source 1..445: note = SBI00589_Putative aldehyde dehydrogenase
MEQQLKDDIQRVFQLQKKQQKVLRASTAEQRKEKLQRFLDSVIAHEEEIIEAIRKDVRKPYHEVKKAEIEGTKKAIRDNMNNLEKWMAPKEVGSSLSSEANGILMYEPKGVTLILGPWNYPFMLTMAPLAASLAAGNSAIVKLSDFTMNTSNIAAKVIRDAFDEKEVAIFEGEVEVATELLDQPFDHIFFTGSTNVGKIVMTAAAKHLASVTLELGGKSPTIIDNEYDLMDAAKKIAVGKFVNAGQTCIAPDYIFIKKDVQDKFAGILQTIVNAGFMEDDHNPDRSKFTQIVNDRNFNRVKDLFDDAIEKGAEVVFGGVFDASDRTISPTVLKNVTPDMKIMQEEIFAPILPMMNYEDIDEVIDYVNDRDKPLALYVFSHNQDLIDNVLQHTTSGNAAINDVVVHFSDVNLPFGGVNTSGIGSYHGVYGFKEFSHEKGVLIQASK

SEQ ID NO: 842 - protein, 473 aa, Bacillus axarquiensis
  source 1..473: note = SBI00589_3-polyprenyl-4-hydroxybenzoate decarboxylase
MAYQDFREFLAALEKEGQLLTVNEEVKPEPDLGAAARAASNLGDKSPALLFNNIYGYNNAQIAMNVIGSWPNHAMMLGLPKDTPVKEQFFEFAKRYEQFPMPVKREETAPFHENEITEDINLFDILPLFRINQGDGGYYLDKACVISRDLEDPDTFGKQNVGIYRMQVKGKDRLGIQPVPQHDIAIHLRQAEERGINLPVTIALGCEPVITTAASTPLLYDQSEYEMAGAIQGEPYRIVKSKLSDLDIPWGAEVVLEGEIIAGEREYEGPFGEFTGHYSGGRSMPIIKINRVYHRNNPIFEHLYLGMPWTECDYMIGINTCVPLYQQLKEAYPNEIVAVNAMYTHGLIAIVSTKNRYGGFAKAVGMRALTTPHGLGYCKMVIVVDEDVDPFNLPQVMWALSTKMHPKHDAVIIPDLSVLPLDPGSNPSGITHKMILDATTPVAPETRGHYSQPLDSPLTTKEWEQKLMDLMNK

SEQ ID NO: 843 - protein, 361 aa, Bacillus mojavensis
  source 1..361: note = SBI00592_Endo-1,4-beta-glucanase
MAKLDETLTMLKELTDAKGIPGNEREVRQVMKSYIEPFADEVTTDRLGSLIAKKTGAENGPKIMIAGHLDEVGFMVTQITDKGFIRFQTVGGWWSQVMLAQRVTIVTKKGEVTGVIGSKPPHILSAEARKKPVDIKEMFVDIGASSREEALEWGVLPGDMIVPHFEFTVMNNEKFLLAKAWDNRIGCAIAIDVLRNLKNTNHPNVVYGVGTVQEEVGLRGAKTSAHTIQPDIAFGVDVGIAGDTPGISEKEAQSKMGEGPQIILYDASMVSHKGLRDLVVNTAEEAGIPYQFDAIAGGGTDSGSIHLTANGVPALSITIATRYIHTHAAMLHRDDYENAVKLITEVIKKLDRQTVDDITYQ

SEQ ID NO: 844 - protein, 323 aa, Bacillus mojavensis
  source 1..323: note = SBI00592_Phosphate acetyltransferase
MADLFSTVQEKVAGKGVKIVFPEGLDERILVAVSKLADNKVLNPIVIGNENEIQAKAKELNLTLDGVDIYDPHTYEGMEDLVQAFVERRKGKATEEQARKALLDENYFGTMLVYKGLAAGLVSGAAHSTADTVRPALQIIKTKEGVKKTSGVFIMARGDEQYVFADCAINIAPDSQDLAEIAIESANTAKMFDIDPRVAMLSFSTKGSAKSDETEKVADAVKIAKEKAPELTLDGEFQFDAAFVPSVAEKKAPDSEIKGDANVFVFPSLEAGNIGYKIAQRLGNFEAVGPILQGLNMPVNDLSRGCNAEDVYNLALITAAQAL

SEQ ID NO: 845 - protein, 395 aa, Bacillus mojavensis
  source 1..395: note = SBI00592_Acetate kinase
MSKIIAINAGSSSLKFQLFEMPSEKVLTKGLVERIGIADSVFTISVNGEKNTEVTDIPDHAVAVKMLLNKLTEFGIIKNLNEIDGIGHRVVHGGEKFSDSVLLTDETIQEIEDISELAPLHNPANIVGIKAFKEVLPNVPAVAVFDTAFHQTMPEQSYLYSLPYEYYEKFGIRKYGFHGTSHKYVTERAAELLGRPLKDLRLISCHLGNGASIAAVEGGKSIDTSMGFTPLAGVAMGTRSGNIDPALIPYIMEKTGQTADEVLNTLNKKSGLLGISGFSSDLRDIVEATKQGNERAETALEVFASRIHKYIGSYAARMSGVDAIIFTAGIGENSVEVRERVLRGLEFMGVYWDPALNNVRGEEAFISYPHSPVKVMIIPTDEEVMIARDVVRLAK

SEQ ID NO: 846 - protein, 473 aa, Bacillus mojavensis
  source 1..473: note = SBI00592_3-polyprenyl-4-hydroxybenzoate decarboxylase
MAYQDFREFLAALEKEGQLLTVNEEVKPEPDLGAAARAASNLGDKSPALLFNNIYGYNNAQIAMNVIGSWPNHAMMLGLPKDTPVKEQFFEFAKRYEQFPMEVKREETAPFHENEITEDINLFDILPLFRINQGDGGYYLDKACVISRDLEDPDNFGKQNVGIYRMQVKGKDRLGIQPVPQHDIAIHLRQAEERGINLPVTIALGCEPVITTAASTPLLYDQSEYEMAGAIQGEPYRIVKSKLSDLDIPWGAEVVLEGEIIAGEREYEGPFGEFTGHYSGGRSMPIIKIKRVYHRNNPIFEHLYLGMPWTECDYMIGINTCVPLYQQLKEAYPNEIVAVNAMYTHGLIAIVSTKNRYGGFAKAVGMRALTTPHGLGYCKMVIVVDEDVDPFNLPQVMWALSTKMHPKHDAVIIPDLSVLPLDPGSNPSGITHKMILDATTPVAPETRGHYSQPLDSPLTTKEWEQKLMDLMNK

SEQ ID NO: 847 - protein, 445 aa, Bacillus mojavensis
  source 1..445: note = SBI00592_Putative aldehyde dehydrogenase
MEQQVKDDIQRVFQLQKKQQKVLRASTAEQRKEKLQRFLDSVIAHEEEIIEAIRKDVRKPYHEVKKAEIEGTKKAIRDNMNNLETWMAPKEVGSSLSSDANGILMYEPKGVTLILGPWNYPFMLTMAPLAASIAAGNSAIVKLSDFTMNTSNIAAKVIRDAFDEKEVAIFEGEVEVATELLDQPFDHIFFTGSTNVGKIVMTAAAKHLASVTLELGGKSPTIIDSEYDLMDAAKKIAVGKFVNAGQTCIAPDYVFIKKDVQDKFAGILQTIVNAGFMEDDYTPDRNKFTQIVNDRNFNRVKALYDDAIEKGAEVVFGGVFEASDRTISPTVLKNVTPDMKIMQEEIFAPILPMMNYEDIDEVIDYVNDRDKPLALYVFSHNQDLIDNVLQHTTSGNAAINDVVVHFSDVNLPFGGVNTSGIGSYHGVYGFKEFSHEKGVFIQAAK

SEQ ID NO: 848 - protein, 361 aa, Bacillus subtilis; identical to SEQ ID NO: 838
  source 1..361: note = SBI00598_Endo-1,4-beta-glucanase

SEQ ID NO: 849 - protein, 323 aa, Bacillus subtilis; identical to SEQ ID NO: 839
  source 1..323: note = SBI00598_Phosphate acetyltransferase

SEQ ID NO: 850 - protein, 395 aa, Bacillus subtilis; identical to SEQ ID NO: 840
  source 1..395: note = SBI00598_Acetate kinase

SEQ ID NO: 851 - protein, 445 aa, Bacillus subtilis
  source 1..445: note = SBI00598_Putative aldehyde dehydrogenase
MEQQLKDDIQRVFQLQKKQQKALRASTAEQRKEKLQRFLDSVIAHEEEIIEAIRKDVRKPYHEVKKAEIEGTKKAIRDNMNNLETWMAPKEVGSSLSSDANGILMYEPKGVTLILGPWNYPFMLTMAPLAASIAAGNSAIVKLSDFTMNTSNIAAKVIRDAFDEKEVAIFEGEVEVATELLDQPFDHIFFTGSTNVGKIVMTAAAKHLSSVTLELGGKSPTIIDSEYNLMDAAKKIAVGKFVNAGQTCIAPDYIFIKKDVQDKFAGILQTIVNAGFMEDDYTPDRNKFTQIVNDRNFNRVKALYDNAIEKGAEVVFGGVFDASDRTISPTVLKNVTPDMKIMQEEIFAPILPMMNYEDIDEVIDYVNDRDKPLALYVFSHNQDLIDNVLQHTTSGNAAINDVVVHFSDVNLPFGGVNTSGIGSYHGVYGFKEFSHEKGVFIQAAK

SEQ ID NO: 852 - protein, 473 aa, Bacillus subtilis
  source 1..473: note = SBI00598_3-polyprenyl-4-hydroxybenzoate decarboxylase
MAYQDFREFLAALEKEGQLLTVNEEVKPEPDLGAAARAASNLGDKSPALLFNNIYGYNNAQIAMNVIGSWPNHAMMLGLPKDTPVKEQFFEFAKRYEQFPMPVKREETAPFHENEITEDINLFDILPLFRINQGDGGYYLDKACVISRDLEDPDNFGKQNVGIYRMQVKGKDRLGIQPVPQHDIAIHLRQAEERGINLPVTIALGCEPVITTAASTPLLYDQSEYEMAGAIQGEPYRIVKSKLSDLDVPWGAEVVLEGEIIAGEREYEGPFGEFTGHYSGGRSMPIIKINRVYHRNNPIFEHLYLGMPWTECDYMIGINTCVPLYQQLKEAYPNEIVAVNAMYTHGLIAIVSTKNRYGGFAKAAGMRALTTPHGLGYCKMVIVVDEDVDPFNLPQVMWALSTKMHPKHDAVIIPDLSVLPLDPGSNPSGITHKMILDATTPVAPETRGHYSQPLDSPLTTKEWEQKLMDLMNK

SEQ ID NO: 853 - protein, 367 aa, Bacillus aryabhattai
  source 1..367: note = SBI00644_Endo-1,4-beta-glucanase
MKGVIHMTKLDETLTMLKALTDAKGIPGNEREPREVMKKYIAPYADEVTTDGLGSLIAKKVGNEQGPKIMVAGHLDEVGFMVTQIDEHGFIRFQTVGGWWSQVMLAQRVTIVTSKGEVTGIIGSKPPHILPPEVRKKPVDIKDMFIDIGASSREEVAEWGVKPGDQVVPYFEFTVMNNEKMLLAKAWDNRIGCAIAIDVLKALKNETHENVVYGVGTVQEEVGLRGAKTSANFIEPDIAFAVDVGIAGDTPGVSDKEASSKMGEGPQIILYDASMVSHKGLRDTVVDVADELNIPYQFDAIAGGGTDSGSIHISANGVPALSITIATRYIHSHAAMLHRDDYENAVKLIAEVIKRLDRNTVNAITYN

SEQ ID NO: 854 - protein, 396 aa, Bacillus aryabhattai
  source 1..396: note = SBI00644_Acetate kinase
MSKIMAINAGSSSLKFQLFEMPSETVLTKGLVERIGLDNAVFTISVNGEKQTDITEIPDHAVAVKILVEKLLSQNIIQSYDEITGVGHRVVHGGEKFADSVLITDETLAEIEALSDLAPLHNPANIVGIKAFQDILPNVPAVAVFDTAFHQTMPEKSFLYSLPYEYYEKYGVRKYGFHGTSHKYVSERAAELLGRPIEQLRLISCHLGNGASIAAIEGGKSIDTSMGFTPLAGVAMGTRSGNIDPALIPFIMEKTGKTADEVLNVLNKESGLLGVSGISSDLRDLIKASAEGNERAETALEVFASRIHKYIGSYAARMSGVDAIIFTAGIGENSDVVRARVLRGLEFMGVYWDPALNSVQGEEAFISYPHSPVKVMVIPTDEEVMIARDVTRLANI

SEQ ID NO: 855 - protein, 323 aa, Bacillus aryabhattai
  source 1..323: note = SBI00644_Phosphate acetyltransferase
MSDLFTGLKQKVSASDVSIVFPEGLDERVLGAVSRLAADNILKPIVVGNKDAVASKAAELNVKLDGVEVLDPQSYSEFDEMVAAFVERRKGKATEEDARKILLDENYFGTMLVHMNKADGLVSGAAHSTADTVRPALQIIKTRQGVKKTSGVFIMVRGDQKYVFADCAINISPDSQDLAEIAIESARTAEMFDIDPRVAMLSFSTKGSAKSPETEKVANAVEIAKELAPSVTLDGEFQFDAAFVPSVAEKKAPGSVIKGDANVFVFPSLEAGNIGYKIAQRLGNFEAVGPILQGLNKPVNDLSRGCNEEDVYKLALITAAQAL

SEQ ID NO: 856 - protein, 86 aa, Bacillus aryabhattai
  source 1..86: note = SBI00644_3-polyprenyl-4-hydroxybenzoate decarboxylase
MDPFNLPQVMWALSTKMHPKHDVITVPNLSVLPLDPGSEPAGITDKMILDATTPVAPETRGHYSQPLDTPLETEKWEKILTNMMQK

SEQ ID NO: 857 - protein, 361 aa, Bacillus subtilis; identical to SEQ ID NO: 829
  source 1..361: note = SBI00693_Endo-1,4-beta-glucanase

SEQ ID NO: 858 - protein, 395 aa, Bacillus subtilis; identical to SEQ ID NO: 770
  source 1..395: note = SBI00693_Acetate kinase

SEQ ID NO: 859 - protein, 323 aa, Bacillus subtilis; identical to SEQ ID NO: 771
  source 1..323: note = SBI00693_Phosphate acetyltransferase

SEQ ID NO: 860 - protein, 445 aa, Bacillus subtilis; identical to SEQ ID NO: 833
  source 1..445: note = SBI00693_Putative aldehyde dehydrogenase

SEQ ID NO: 861 - protein, 473 aa, Bacillus subtilis
  source 1..473: note = SBI00693_3-polyprenyl-4-hydroxybenzoate decarboxylase
MAYQDFREFLAALEKEGQLLTVNEEVKPEPDLGASARAASNLGDKSPALLFNNIYGYHNARIAMNVIGSWPNHAMMLGMPKDTPVKEQFFEFAKRYDQFPMPVKREETAPFHENEITEDINLFDILPLFRINQGDGGYYLDKACVISRDLEDPDNFGKQNVGIYRMQVKGKDRLGIQPVPQHDIAIHLRQAEERGINLPVTIALGCEPVITTAASTPLLYDQSEYEMAGAIQGEPYRIVKSKLSDLDVPWGAEVVLEGEIIAGEREYEGPFGEFTGHYSGGRSMPIIKIKRVYHRNNPIFEHLYLGMPWTECDYMIGINTCVPLYQQLKEAYPNEIVAVNAMYTHGLIAIVSTKTRYGGFAKAVGMRALTTPHGLGYCKMVIVVDEDVDPFNLPQVMWALSTKMHPKHDAVIIPDLSVLPLDPGSNPSGITHKMILDATTPVAPETRGHYSQPLDSPLTTKEWEQKLMDLMNK

SEQ ID NO: 862 - protein, 361 aa, Bacillus subtilis; identical to SEQ ID NO: 769
  source 1..361: note = SBI00714_Endo-1,4-beta-glucanase

SEQ ID NO: 863 - protein, 418 aa, Bacillus subtilis
  source 1..418: note = SBI00714_Acetate kinase
MRFTGKKVRKNEVVDTEYKGASIMSKIIAINAGSSSLKFQLFEMPSETVLTKGLVERIGIADSVFTISVNGEKNKEVTDIPDHAVAVKMLLNKLTEFGIIKDLNEIDGIGHRVVHGGEKFSDSVLLTDETIKEIEDISELAPLHNPANIVGIKAFKEVLPNVPAVAVFDTAFHQTMPEQSYLYSLPYEYYEKFGIRKYGFHGTSHKYVTERAAELLGRPLKDLRLISCHLGNGASIAAVEGGKSIDTSMGFTPLAGVAMGTRSGNIDPALIPYIMEKTGQTADEVLNTLNKKSGLLGISGFSSDLRDIVEATKEGNERAETALEVFASRIHKYIGSYAARMSGVDAIIFTAGIGENSVEVRERVLRGLEFMGVYWDPALNNVRGEEAFISYPHSPVKVMIIPTDEEVMIARDVVRLAK

SEQ ID NO: 864 - protein, 323 aa, Bacillus subtilis; identical to SEQ ID NO: 771
  source 1..323: note = SBI00714_Phosphate acetyltransferase

SEQ ID NO: 865 - protein, 293 aa, Bacillus subtilis; identical to SEQ ID NO: 772
  source 1..293: note = SBI00714_Glucose-1-phosphate thymidylyltransferase

SEQ ID NO: 866 - protein, 475 aa, Bacillus subtilis
  source 1..475: note = SBI00714_3-polyprenyl-4-hydroxybenzoate decarboxylase
MAYQDFRGFLAALEKEGQLLTVNEEVKPEPDLGAAARAASNLGDKSPALLFNNIYGYHNAQIAMNVIGSWPNHAMMLNMPKDTPVKEQFFEFAKRYDQFPMPVKREETAPFHENEITEDINLFDILPLFRINQGDGGYYLDKACVISRDLEDPDNFGKQNVGIYRMQVKGKDRLGIQPVPQHDIAIHLRQAEERGINLPVTIALGCEPVITTAASTPLLYDQSEYEMAGAIQGEPYRIVKSKLSDLDVPWGAEVVLEGEIIAGEREYEGPFGEFTGHYSGGRSMPIIKIKRVYHRNNPIFEHLYLGMPWTECDYMIGINTCVPLYQQLKEAYPNEIVAVNAMYTHGLIAIVSTKTRYGGFAKAVGMRALTTPHGLGYCKMVIVVDEDVDPFNLPQVMWALSTKMHPKHDAVIIPDLSVLPLDPGSNPSGITHKMILDATTPVAPETRGHYSQPLDSPLTTKEWEQKLMDLINRKG

SEQ ID NO: 867 - protein, 445 aa, Bacillus subtilis; identical to SEQ ID NO: 773
  source 1..445: note = SBI00714_Putative aldehyde dehydrogenase

SEQ ID NO: 868 - protein, 362 aa, Bacillus safensis
  source 1..362: note = SBI00997_Endo-1,4-beta-glucanase
MTKLDQTLTMLKDLTDAKGIPGNERDVKKVMQTYIESYADEVSTDRLGSLIAKKEGNANGPKIMLAGHLDEVGFMVTKIDDKGYIRFQTVGGWWSQVMLAQRVTIVTKKGEITGVIGSKPPHVLSPEARKKSIEITDMFIDIGASSKEQAMEWGVLPGDQIVPYFEFTVMNDEKMLLAKAWDNRIGCAVAIDVMKNLHNAQHENIAYSVATVQEEVGLRGAKTAAATIQPDIGFAIDVGVAGDTPGITEKEATSKLGKGPTIVVFDASMVSHKGLRDFVVQTADELNIPYQYDSMPGGGTDAGGIHLTGHGVPSLSIGIPSRYIHTHAAMIQRDDYENAVKLLTEVIKRLDQKTVEQITYGS

SEQ ID NO: 869 - protein, 323 aa, Bacillus safensis; identical to SEQ ID NO: 815
  source 1..323: note = SBI00997_Phosphate acetyltransferase

SEQ ID NO: 870 - protein, 394 aa, Bacillus safensis
  source 1..394: note = SBI00997_Acetate kinase
MSKIIAINAGSSSLKFQLFDMPEETVLTKGLVERIGMDNSIFTISVDGEKKTEVTDIPDHAVAVKMLLEKLTEFHIIKDFNEIDGVGHRVVHGGEKFSDSVLLTDEVINDIDQLSELAPLHNPANVVGIKAFKQILPDVPAVAVFDTAFHQTMPEQSYLYSLPYDYYKNFGIRKYGFHGTSHKFVTERAAELLGRPLEELRLISCHLGNGASIAAVEGGKSIDTSMGFTPLAGVAMGTRSGNIDPALIPFIMEKTGHTAEEVLSTLNKKSGLLGVSGLSSDLRDIEEATEEGNDRAEVALDIFASRIHKYIGSYAARMNGVDAIIFTAGIGENSSEVRARVLRGLEFMGVYWDPSLNNMRGEEAFISYPHSPVKVIVIPTNEEVMIARDVMRLA

SEQ ID NO: 871 - protein, 361 aa, Bacillus amyloliquefaciens
  source 1..361: note = SBI01595_Endo-1,4-beta-glucanase
MTKLDETLTMLKALTDAKGIPGNEREVRQVMKSYIEPFADDVTTDRLGSLIAKKTGKENGPKIMISGHLDEVGFMVTQITDKGFLRFQTVGGWWSQVMLAQRVTVVTKKGDITGIIGSKPPHILPPDARKKAADIKEMFIDIGASSREEAMEWGVLPGDQIVPYFEFTVMNNEKHLLAKAWDNRIGCAIAIDVLKNLKNSDHPNEVYGVGTVQEEVGLRGAKTAAHTIQPDIAFGVDVGIAGDTPGISEKEAQSKIGEGPQIILYDASMVSHKGLRDLVVNTAEEAGIPYQFDSIAGGGTDSGSIHLTANGVPALSITIATRYIHTHAAILHRDDYENTVKLITEVIKKLDRETVDRITYQ

SEQ ID NO: 872 - protein, 395 aa, Bacillus amyloliquefaciens
  source 1..395: note = SBI01595_Acetate kinase
MSKIIAINAGSSSLKFQLFEMPSEKVLTKGLVERIGIADSVFTISVNGEKNTEVTDIPDHAVAVKMLLHKLTEFGIIKDLNEIDGIGHRVVHGGEKFSDSVLLTDETIREIEEISELAPLHNPANIVGIKAFKEVLPNVPAVAVFDTAFHQTMPEQSYLYSLPYEYYEKYGIRKYGFHGTSHKYVTQRAAELLGRPLEDLRLISCHLGNGASIAAVEGGKSIDTSMGFTPLAGVAMGTRSGNIDPALIPYIMEKTDQTADEVLNTLNKKSGLLGVSGFSSDLRDIVEASKEGNERAETALEVFASRIHKYIGSYAARMSGVDAIIFTAGIGENSVEVRERVLRGLEFMGVYWDPALNNVRGEEAFISYPHSPVKVMIIPTDEEVMIARDVVRLAQ

SEQ ID NO: 873 - protein, 323 aa, Bacillus amyloliquefaciens
  source 1..323: note = SBI01595_Phosphate acetyltransferase
MADLFTKVQEKVAGKDVKIVFPEGLDERILVAVNNLAGNKVLKPIVVGNKEDIQAKAKELNLTLDGVDIFDPHTYEGMEELVQAFVERRKGKATEEQARKALLDENYFGTMLVYKGLADGLVSGAAHSTADTVRPALQIIKTKEGVKKTSGVFIMARGDEQYVFADCAINIAPDSQDLAEIAIESANTAQMFDIDPRVAMLSFSTKGSAKSDETDKVAEAVKIAKEKAPELTLDGEFQFDAAFVPSVAEKKAPDSDIKGDANVFVFPSLEAGNIGYKIAQRLGGFEAVGPILQGLNMPVNDLSRGCNAEDVYNLALITAAQAL

SEQ ID NO: 874 - protein, 330 aa, Bacillus amyloliquefaciens
  source 1..330: note = SBI01595_UDP-glucose 4-epimerase
MAILVLGGAGYIGSHAVDQLLNKGFKTIAVDHLQTGHRKAVHEKAVFYHGDIRDKPFLRSVFAKENVTGVLHFAAQSLVGESMKDPLSYFNNNVYGTQITLEVMQEFGVKHIVFSSSAAVYGEPEKVPITEDMPEKPESAYGESKLMAEKMLKWCETACGIKYVSLRYFNVAGAKTDGSIGEDHHPETHLIPILLQTALGQREEVLIFGTDYDTKDGTCIRDYVHVSDLIDAHILALEYLQNGGDSGIFNLGSSSGFSVSEMAEAARQVTERDIKVKAAARRPGDPSTLIASSDKARNILGWNPKQTDISEIIASAWNWHRQHPNGYKDK

SEQ ID NO: 875 - protein, 445 aa, Bacillus amyloliquefaciens
  source 1..445: note = SBI01595_Putative aldehyde dehydrogenase
MDQHIKADIKRVFALQKKNQKTLRASTAGQRREKLQRFLDAVTAHEEEIIEAIRRDVRKPYHEVKRAETQGTIKAIKDNMNNLDTWMAPKRVGSSVSPDADGVLMYEPKGLTLILGPWNYPFMLTMAPLAAAIAAGNSAIVKLSDFTMETSHIAATVIREAFHEEEVAIFEGEVDVATELLDQPFDHIFFTGSTNVGKIVMTAAAKHLSSVTLELGGKSPTIIDSGYDLMDAAKKIAVGKFVNAGQTCIAPDYLLMKEDVQDTFTDLLQTIVNAGFMEDDHTVDRNKFTQIVNDRNFNRVKALYDDAIEKGAKTAFGGVFDAHDRTISPTVLTNVTPDMKIMQEEIFAPILPIMNYEDISEAVDYITERDKPLALYVFSHNQELIDYVLQHTTSGNASVNDVIVHFTDVNLPFGGVNTSGIGSYHGVYGFKEFSHEKGVFIQASK

SEQ ID NO: 876 - protein, 473 aa, Bacillus amyloliquefaciens
  source 1..473: note = SBI01595_3-polyprenyl-4-hydroxybenzoate decarboxylase
MAYQDFREFLAALEKEGQLLTVNEEVKPEPDLGAAARAASNLGDKTPALLFNNIYGHHHAQVALNVIGSWPNHAMMLGMPKDTPVKEQFFEFAKRYDAFPMPVKREETAPFHENEITEDINLFDILPLFRINQGDGGYYLDKACVISRDLEDPDNFGKQNVGIYRMQVKGKDRLGIQPVPQHDIAIHLRQAEERGVNLPVTIALGCEPVITTAASTPLLYDQSEYEMAGAIQGEPYRIVKSKLSDLDIPWGAEVVLEGEILAGEREYEGPFGEFTGHYSGGRSMPVIKIKRVYHRNNPIFEHLYLGMPWTECDYMIGINTCVPLYQQLKEAYPNEIVAVNAMYTHGLIAIISTKTRYGGFAKAVGMRALTTPHGLGYCKMVIVVDEDVDPFNLPQVMWALSTKMHPKHDAVIIPDLSVLPLDPGSDPAGMTHKMILDATTPVAPETRGHYSQPLDSPLTTKEWEQKLMDLMNQ

SEQ ID NO: 877 - protein, 362 aa, Bacillus pumilus
  source 1..362: note = SBI01819_Endo-1,4-beta-glucanase
MTKLDQTLTMLKDLTDAKGIPGNERDVKKVMQTYIESYADEVSSDRLGSLIAKKEGNANGPKIMLAGHLDEVGFMVTKIDDKGYIRFQTVGGWWSQVMLAQRVTIVTKKGDITGVIGSKPPHVLSPEARKKSIEITDMFIDIGASSKEQVMEWGVLPGDQIVPYFEFTVMNDEKMLLAKAWDNRIGCAVAIDVMKNLHNAQHENIAYSVATVQEEVGLRGAKTAAATIQPDIGFAIDVGVAGDTPGITEKEATSKLGKGPTIVVFDASMVSHKGLRDFVVQTADELNIPYQYDSMPGGGTDAGGIHLTGHGVPSLSIGIPSRYIHTHAAMIHRDDYENAVKLLTEVIKRLDQKTVEQITYGS

SEQ ID NO: 878 - protein, 323 aa, Bacillus pumilus
  source 1..323: note = SBI01819_Phosphate acetyltransferase
MADIFSTVQEKVAGKGVKIVFPEGMDERILTAVQKLADGKVLQPIVVGKKQEVEAKAKELGLTLDGVDVYDPHTYEGFEELVQAFVERRKGKATEEQARKALLDENYFGTMLVYKGLADGLVSGAAHSTADTVRPALQIIKTKEGVKKTSGVFIMARGEEQYVFADCAINIAPDSQDLAEIAIESANTAKMFDIEPRVAMLSFSTKGSAKSDETEKVSEAVRIAKEKAPELVLDGEFQFDAAFVPSVAAKKAPDSVIKGDASVFVFPSLEAGNIGYKIAQRLGNFEAVGPILQGLNQPVNDLSRGCNAEDVYNLALITAAQAR

SEQ ID NO: 879 - protein, 394 aa, Bacillus pumilus
  source 1..394: note = SBI01819_Acetate kinase
MSKIIAINAGSSSLKFQLFDMPEETVLTKGLVERIGMDNSIFTISVDGEKKTEITDIPDHAVAVKMLLEKLIEFNIIKDFNEIDGVGHRVVHGGEKFSDSVLLTDEVINDIDQLSELAPLHNPANVVGIKAFKQILPDVPAIAVFDTAFHQTMPEQSYLYSLPYDYYKNFGIRKYGFHGTSHKFVTERAAELLGRPLEELRLISCHLGNGASIAAVEGGKSIDTSMGFTPLAGVAMGTRSGNIDPALIPFIMEKTGHTAEEVLSTLNKKSGLLGVSGLSSDLRDIEEATEEGNDRAEVALDIFASRIHKYIGSYAARMNGVDAIIFTAGIGENSSEVRARVLRGLEFMGVYWDPSLNNMRGEEAFISYPHSPVKVIVIPTNEEVMIARDVMRLA

SEQ ID NO: 880 - protein, 361 aa, Bacillus amyloliquefaciens; identical to SEQ ID NO: 871
  source 1..361: note = SBI02181_Endo-1,4-beta-glucanase

SEQ ID NO: 881 - protein, 323 aa, Bacillus amyloliquefaciens; identical to SEQ ID NO: 873
  source 1..323: note = SBI02181_Phosphate acetyltransferase

SEQ ID NO: 882 - protein, 395 aa, Bacillus amyloliquefaciens
  source 1..395: note = SBI02181_Acetate kinase
MSKIIAINAGSSSLKFQLFEMPSEKVLTKGLVERIGIADSVFTISVNGEKNTEVTDIPDHAVAVKMLLHKLTEFGIIKDLNEIDGIGHRVVHGGEKFSDSVLLTDETIREIEEISELAPLHNPANIVGIKAFKEVLPDVPAVAVFDTAFHQTMPEQSYLYSLPYEYYEKYGIRKYGFHGTSHKYVTQRAAELLGRPLEDLRLISCHLGNGASIAAVEGGKSIDTSMGFTPLAGVAMGTRSGNIDPALIPYIMEKTDQTADEVLNTLNKKSGLLGISGFSSDLRDIVEASKEGNERAETALEVFASRIHKYIGSYAARMSGVDAIIFTAGIGENSVEVRERVLRGLEFMGVYWDPALNNVRGEEAFISYPHSPVKVIIIPTDEEVMIARDVVRLAQ

SEQ ID NO: 883 - protein, 330 aa, Bacillus amyloliquefaciens
  source 1..330: note = SBI02181_UDP-glucose 4-epimerase
MAILVLGGAGYIGSHAVDQLVNKGFKTIAVDNLQTGHRKAVHEKAVFYHGDIRDKPFLRSVFAKENVTGVLHFAAQSLVGESMKDPLSYFNNNVYGTQITLEVMQEFGVKHIVFSSSAAVYGEPEKVPITEDMPEKPESAYGESKLMAEKMLKWCDTACGIKYVSLRYFNVAGAKTDGSIGEDHHPETHLIPILLQTALGQREEVLIFGTDYDTKDGTCIRDYVHVSDLIDAHILALEYLQNGGDSGIFNLGSSSGFSVSEIAEAARQVTERDIKVRASARRPGDPSALIASSDKARNILGWNPKQTDISEIIASAWNWHRHHPNGYKDK

SEQ ID NO: 884 - protein, 445 aa, Bacillus amyloliquefaciens
  source 1..445: note = SBI02181_Putative aldehyde dehydrogenase
MDQHIKADIKRVFALQKKNQKTLRASTAGQRREKLQRFLDAVTAHEEEIIEAIRRDVRKPYHEVKRAETQGTIKAIKDNMNNLDTWMAPKRVGSSVSPDADGVLMYEPKGLTLILGPWNYPFMLTMAPLAAAIAAGNSAIVKLSDFTMETSHIAATVIREAFHEEEVAIFEGEVDVATELLDQPFDHIFFTGSTNVGKIVMTAAAKHLSSVTLELGGKSPTIIDSGYDLMDAAKKIAVGKFVNAGQTCIAPDYLLMKEDVQDTFTDLLQTIVNAGFMEDDHTVDRNKFTQIVNDRNFNRVKALYDDAIEKGAKTAFGGVFDAHDRTISPTVLTNVTPDMKIMQEEIFAPILPIMNYEDISEAVDYITERDKPLALYVFSHNQELIDYVLQHTTSGNASVNDVVVHFTDVNLPFGGVNTSGIGSYHGVYGFKEFSHEKGVFIQASK

SEQ ID NO: 885 - protein, 473 aa, Bacillus amyloliquefaciens
  source 1..473: note = SBI02181_3-polyprenyl-4-hydroxybenzoate decarboxylase
MAYQDFREFLAALEKEGQLLTVNEEVKPEPDLGAAARAASNLGDKTPALLFNNIYGHHDAQVALNVIGSWPNHAMMLGMPKDTPVKEQFFEFAKRYDAFPVPVKREETAPFHENEITEDINLFDILPLFRINQGDGGYYLDKACVISRDLEDPDNFGKQNVGIYRMQVKGKDRLGIQPVPQHDIAIHLRQAEERGVNLPVTIALGCEPVITTAASTPLLYDQSEYEMAGAIQGEPYRIVKSKLSDLDIPWGAEVVLEGEILAGEREYEGPFGEFTGHYSGGRSMPVIKIKRVYHRNNPIFEHLYLGMPWTECDYMIGINTCVPLYQQLKEAYPNEIVAVNAMYTHGLIAIISTKTRYGGFAKAVGMRALTTPHGLGYCKMVIVVDEDVDPFNLPQVMWALSTKMHPKHDAVIIPDLSVLPLDPGSDPAGMTHKMILDATTPVAPETRGHYSQPLDSPLTTKEWEQKLMDLMNQ

SEQ ID NO: 886 - protein, 361 aa, Bacillus licheniformis
  source 1..361: note = SBI02185_Endo-1,4-beta-glucanase
MAKLDETLTMLKELTDAKGIPANEKEPRQVMKSYIEPFADEVTTDRLGSLIAKKTGQADGPKIMIAGHLDEVGFMVTRIDDRGYLRFQTVGGWWSQVMLAQRVTVVTKKGDITGIIGSKPPHVLSQEARKKSVDIKDMFIDIGASNREEAMEWGVLPGDQVVPYFEFTVMNNEKMLLAKAWDNRIGCAIAIDVLKNLKGADHPNVVYGVGTVQEEVGLRGAKTAAHTIKPDIAFGVDVGIAGDTPGITEKESTSKMGKGPQIILYDASMVSHKGLRDFVTNVADEAGIPYQFDALSGGGTDSGSIHLTANGVPALSITIATRYIHTHAAMLHRDDYEHAVKLITEVIKRLDKETVQNITFD

SEQ ID NO: 887 - protein, 323 aa, Bacillus licheniformis
  source 1..323: note = SBI02185_Phosphate acetyltransferase
MADLFTTVQEKVAGKGVKIVFPEGMDERILKAVNDLAGNNVLKPILVGNEQEIKDKANGLNLTLDGVDIYDPHTYEGMEDLVQAFVERRKGKATEEQARQILLDENYFGTMLVYKGLADGLVSGAAHSTADTVRPALQIIKTKEGVKKTSGVFIMARGDEQYVFADCAINIAPDSQDLAEIAIESANTAKMFNIDPRVAMLSFSTKGSAKSDETEKVANAVAIAKEKAPELTLDGEFQFDAAFVPSVAEKKAPDSVIKGDANVFVFPSLEAGNIGYKIAQRLGNFEAVGPILQGLNMPVNDLSRGCNAEDVYNLALITAVQAL

SEQ ID NO: 888 - protein, 395 aa, Bacillus licheniformis
  source 1..395: note = SBI02185_Acetate kinase
MSKIIAINAGSSSLKFQLFEMPSEKVLTKGLVERIGLDNGIFTISVNDEKKTETTDIPDHSVAVKMLLDKLTKFGIIKDLNEIDGIGHRVVHGGEKFSDSVLLTDEMIHEIEEISELAPLHNPANIVGIKAFKEVLPNVPAVAVFDTAFHQTMPEQSYLYSLPYEYYEKFGIRKYGFHGTSHKYVTERAAELLGRPIEELRLISCHLGNGASIAAVEGGKSIDTSMGFTPLAGVAMGTRSGNIDPALIPFIMEKTGQTADEVLNTLNKKSGLLGISGFSSDLRDIVEATKEGNERAETALEVFASRIHKYIGSYAARMSGVDAIIFTAGIGENSVEVRERVLHGLEFMGVYWDPALNNVRGKEAFISYPHSPVKVLVIPTNEEVMIARDVVRLAH

SEQ ID NO: 889 - protein, 333 aa, Bacillus licheniformis
  source 1..333: note = SBI02185_UDP-glucose 4-epimerase
MSVLVLGGAGYIGSHAVYQLLDRGETVVVVDNLETGQRQAVHPEAVFYEGDVRDRDFLRTVFKKERIEEVIHFAASSLVGESMKDPLKYYDNNVSGTQVLLQTMLEHDVKKIVFSSTAAVYGEPESVPITEVMPTRPTSTYGETKLIMEKLMKRTEEAHGVSFVSLRYFNVAGARETGEIGEDHHPETHLVPIILQTALGQRPHITIFGDDYDTPDGTCIRDYVHVEDLIDAHLSALDYLREGGKSDIFNLGSSEGFSVKEMIDAARKVTGKDIPAEIGKRRAGDPSILIAGSDKAKQVLGWRPSRTSVAKIIEDAWKWHSSHPNGYRKEVST

SEQ ID NO: 890 - protein, 473 aa, Bacillus licheniformis
  source 1..473: note = SBI02185_3-polyprenyl-4-hydroxybenzoate decarboxylase
MAYQDFRDFLNTLKKEGQLLEVQEEVKPEPDLGAAARAANNLGDKSPALLFNNIYGYNNAQIALNVISSWPNHALMLGLPKDTPVKEQFFEFARRYDQFPVKVQREETAPFHENDITEDINLFDILPLFRINQGDGGFYLDKACVISRDVEDPEHFGKQNVGMYRLQVKGKDRLGIQPVPQHDIAIHLRQAEERGENLPVTIALGCEPVIATAASTPLLYDQSEYEMAGALQGEPYKIVKSKLSNLDIPWGAEVVLEGEILAGEREYEGPFGEFTGHYSGGRSMPIIKIKRVCHRNNPIFEHLYLGMPWTEVDYMVGINTCVPLYQQLKEAYPNEIVAVNAMYTHGLIAIVSTKSRYGGFAKAVGMRALTTPHGLGYCKMVILVDEDVDPFNLPQVMWAISTKMHPKHDAVIIPDLSVLALDPGSEPAGITHKMILDATTPVAPETRGHYSQPLDSPIGTKEWEAKLMNLLNQ

SEQ ID NO: 891 - protein, 362 aa, Bacillus pumilus
  source 1..362: note = SBI02354_Endo-1,4-beta-glucanase
MTKLDQTLTMLKDLTDAKGIPGNERDVKKVMQSYIETYADEVSTDRLGSLIAKKEGNANGPKVMLAGHLDEVGFMVTKIDDKGYIRFQTVGGWWSQVMLAQRVTIVTKKGDITGVIGSKPPHVLSPEARKKSIEITDMFIDIGASSKEQAMEWGVLPGDQIVPYFEFTVMNDEKMLLAKAWDNRIGCAVAIDVMKNLKDTQHENIAYSVATVQEEVGLRGAKTAAATIQPDIGFAIDVGVAGDTPGITEKEATSKLGKGPTIVVFDASMVSHKGLRDFVVQTADELNIPYQYDSMPGGGTDAGGIHLTGHGVPSLSIGIPSRYIHTHAAMIHRDDYENAVKLLTEVIKRLDQKTVNQITYGS

SEQ ID NO: 892 - protein, 323 aa, Bacillus pumilus
  source 1..323: note = SBI02354_Phosphate acetyltransferase
MADIFSTVQEKVAGKGVKIVFPEGMDERILTAVQKLADGKVLQPIVVGKKEEVEAKAKELGLTLDGVDVYDPHTYEGFEDLVQAFVERRKGKATEEQARKALLDENYFGTMLVYKGLADGLVSGAAHSTADTVRPALQIIKTKEGVKKTSGVFIMARGEEQYVFADCAINIAPDSQDLAEIAIESANTAKMFDIEPRVAMLSFSTKGSAKSDETDKVSEAVRIAKEKAPELVLDGEFQFDAAFVPSVAAKKAPDSVIKGDASVFVFPSLEAGNIGYKIAQRLGNFEAVGPILQGLNQPVNDLSRGCNAEDVYNLALITAAQAL

SEQ ID NO: 893 - protein, 395 aa, Bacillus pumilus
  source 1..395: note = SBI02354_Acetate kinase
MSKIIAINAGSSSLKFQLFDMPKETVLTKGLVERIGMDNSIFTISVDGEKKTEVTDIPDHAVAVKMLLEKLIEFNIIKDFNEIDGVGHRVVHGGEKFSDSVVLTDEVINDIDQLSELAPLHNPANVVGIKAFKQILPDVPAIAVFDTAFHQTMPEQSYLYSLPYDYYKNFGIRKYGFHGTSHKFVTERAAELLGRPLEELRLISCHLGNGASIAAVEGGKSIDTSMGFTPLAGVAMGTRSGNIDPALIPFIMEKTGHTAEEVLSTLNKKSGLLGVSGLSSDLRDIEEATEEGNDRAEVALDIFASRIHKYIGSYAARMNGVDAIIFTAGIGENSSEVRARVLRGLEFMGVYWDPSLNNMRGEEAFISYPHSPVKVIVIPTNEEVMIARDVLRLAN

SEQ ID NO: 894 - protein, 362 aa, Bacillus altitudinis
  source 1..362: note = SBI03005_Endo-1,4-beta-glucanase
MTKLDQTLTMLKDLTDAKGIPGNERDVKKVMQSYIETYADEVSTDRLGSLIAKKEGNANGPKVMLAGHLDEVGFMVTKIDDKGYIRFQTVGGWWSQVMLAQRVTIVTKKGDITGVIGSKPPHVLSPEARKKSIEITDMFIDIGASSKEQAMEWGVLPGDQIVPYFEFTVMNDEKMLLAKAWDNRIGCAVAIDVMKNLKDTQHENIAYSVATVQEEVGLRGAKTAAATIQPDIGFAIDVGVAGDTPGITEKEATSKLGKGPTIVVFDASMVSHKGLRDFVVQTADELNIPYQYDSMPGGGTDAGGIHLTGHGVPSLSIGIPSRYIHTHAAMIHRDDYENAVKLLTEVIKRLDQKTVEQITYGS

SEQ ID NO: 895 - protein, 394 aa, Bacillus altitudinis
  source 1..394: note = SBI03005_Acetate kinase
MSKIIAINAGSSSLKFQLFDMPEETVLTKGLVERIGMDNSIFTISVDGEKKTEVTDIPDHAVAVKMLLEKLIEFNIIKDFNEIDGVGHRVVHGGEKFSDSVVLTDEVIKDIDQLSELAPLHNPANVVGIKAFKQILPDVPAIAVFDTAFHQTMPEQSYLYSLPYDYYKNFGIRKYGFHGTSHKFVTERAAELLGRPLEELRLISCHLGNGASIAAVEGGKSIDTSMGFTPLAGVAMGTRSGNIDPALIPFIMEKTGHTAEEVLSTLNKKSGLLGVSGLSSDLRDIEEATEEGNDRAEVALDIFASRIHKYIGSYAARMNGVDAIIFTAGIGENSSEVRARVLRGLEFMGVYWDPSLNNMRGEEAFISYPHSPVKVIVIPTNEEVMIARDVMRLA

SEQ ID NO: 896 - protein, 323 aa, Bacillus altitudinis; identical to SEQ ID NO: 892
  source 1..323: note = SBI03005_Phosphate acetyltransferase

SEQ ID NO: 897 - protein, 361 aa, Bacillus endophyticus
  source 1..361: note = SBI03599_Endo-1,4-beta-glucanase
MAKLDETLTMLKDLTDAKGIPGNEREVRAVMEKYISSYADDVTTDRLGSLIARKVGDENGPKIMIAGHLDEVGFMVTNIDDKGFIRFQTVGGWWSQVMLAQRVTIVTSKGDVTGIIGSKPPHILPPEARKKPVEIKDMFIDIGASSKEEASEFGVRPGDQVVPYFEFTVMQNEKMMLAKAWDNRIGCAIAIDVLKGLKNENHPNVVYGVGTVQEEVGLRGARTSATQIEPDIAFGVDVGVAGDTPGVTEKEALGKMGNGPQIILYDASMVSHKGLRDLVTDTADELNIPYQFDAMAGGGTDSGAIHLTANGVPALSITIATRYIHSHAAMLHRDDYENTVKLITEVVKRLDRDKVNEITFN

SEQ ID NO: 898 - protein, 396 aa, Bacillus endophyticus
  source 1..396: note = SBI03599_Acetate kinase
MTKILAINAGSSSLKFQLFEMPSETVLTKGLVERIGLDNAVFNIVVNGEKKEEITDIPDHAVAVKILLDKLISENVISSYDEINGVGHRVVHGGEIFSDSALITDETLAQIEELSELAPLHNPANVVGIKAFKEIMPNIPSVAVFDTAFHQSMPEQSYLYSLPYEYYEKYGVRKYGFHGTSHKFVSQRAAELLGRPIEQLRIITCHLGNGASIAAVEGGKSIDTSMGFTPLAGVAMGTRSGNIDPALIPFIMEKTGKTADEVLQVLNKESGLLGVSGISSDLRDLLGQAEEGNERAELALEVFSSRIHKYIGSYAARMSGVDAIVFTAGIGENSVEIRERILKGLEFMGVYWDKDLNNVRGDEAFVSYPHSPVKVIVIPTNEEVMIARDVTRLANM

SEQ ID NO: 899 - protein, 323 aa, Bacillus endophyticus
  source 1..323: note = SBI03599_Phosphate acetyltransferase
MSDLFSSLKDKVKGQNIRIVFPEGLDERVLGAVSRLAADGLVTPIVIGSQEEVAKKAGEINASLEGVTVYDPQNYEGFEEMVASFVERRNGKATEEDARKILLDENYFGTMLVHMDKADGLVSGAAHSTADTVRPALQIIKTKQGVKKTSGVFIMVRGEERYVFADCAINIAPDSQDLAEIAIESANTADMFGITPQVAMLSFSTKGSAKSPETEKVADAVTIAKEKNPTLVLDGEFQFDAAFVPEVAAKKAPDSVLKGDANVFVFPSLEAGNIGYKIAQRLGNFEAVGPILQGLNKPVNDLSRGCSEEDVYKLAIITSAQAL

SEQ ID NO: 900 - protein, 167 aa, Bacillus endophyticus
  source 1..167: note = SBI03599_3-polyprenyl-4-hydroxybenzoate decarboxylase
MPWTECDYMIGINTCVPLYQQLKQAFPEEIVAVNAMYTHGLIAIISTKSRYGGFAKAVGMKALTTPHGLGYCKMVIVVDEDVDPFNLPQVMWALSTKMHPKHDAIQIPNLSVLPLDPGSDTAGITHKMILDATTPTAPETRGHYSQPLDEPLTTKEWEKKLQDMLSK

SEQ ID NO: 901 - protein, 361 aa, Bacillus subtilis; identical to SEQ ID NO: 829
  source 1..361: note = SBI03602_Endo-1,4-beta-glucanase

SEQ ID NO: 902 - protein, 323 aa, Bacillus subtilis; identical to SEQ ID NO: 771
  source 1..323: note = SBI03602_Phosphate acetyltransferase

SEQ ID NO: 903 - protein, 433 aa, Bacillus subtilis
  source 1..433: note = SBI03602_Acetate kinase
MTMFKWKSQIFFGEDVDIHREKSTKNEVVDTEYKGASIMSKIIAINAGSSSLKFQLFEMPSETVLTKGLVERIGIADSVFTISVNGEKNTEVTDIPDHAVAVKMLLNKLTEFGIIKDLNEIDGIGHRVVHGGEKFSDSVLLTDETIKEIEDISELAPLHNPANIVGIKAFKEVLPNVPAVAVFDTAFHQTMPEQSYLYSLPYEYYEKFGIRKYGFHGTSHKYVTERAAELLGRPLKDLRLISCHLGNGASIAAVEGGKSIDTSMGFTPLAGVAMGTRSGNIDPALIPYIMEKTGQTADEVLNTLNKKSGLLGISGFSSDLRDIVEATKEGNERAETALEVFASRIHKYIGSYAARMSGVDAIIFTAGIGENSVEVRERVLRGLEFMGVYWDPALNNVRGEEAFISYPHSPVKVMIIPTDEEVMIARDVVRLAK

SEQ ID NO: 904 - protein, 473 aa, Bacillus subtilis
  source 1..473: note = SBI03602_3-polyprenyl-4-hydroxybenzoate decarboxylase
MAYQDFREFLAALEKEGQLLTVNEEVKPEPDLGAAARAASNLGDKSPVLLFNNIYGYHNAQIAMNVIGSWPNHAMMLGMPKDTPVKEQFFEFAKRYDQFPMPVKREETAPFHENEITEDINLFDILPLFRINQGDGGYYLDKACVISRDLEDPDNFGKQNVGIYRMQVKGKDRLGIQPVPQHDIAIHLRQAEERGINLPVTIVLGCEPVITTAASTPLLYDQSEYEMAGAIQGEPYRIVKSKLSDLDVPWGAEVVLEGEIIAGEREYEGPFGEFTGHYSGGRSMPIIKIKRVYHRNNPIFEHLYLGMPWTECDYMIGINTCVPLYQQLKEAYPNEIVAVNAMYTHGLIAIVSTKTRYGGFAKAVGMRALTTPHGLGYCKMVIVVDEDVDPFNLPQVMWALSTKMHPKHDAVIIPDLSVLPLDPGSNPSGITHKMILDATTPVAPETRGHYSQPLDSPLTTKEWEQKLMDLMNK

SEQ ID NO: 905 - protein, 359 aa, Bacillus subtilis
  source 1..359: note = SBI03602_Putative aldehyde dehydrogenase
MAPKEVGSSLSPDANGILMYEPKGVTLILGPWNYPFMLTMAPLAASLAAGNSAIVKLSDFTMNTSNIAAKVIRDAFDEKEVAIFEGEVEVATELLDQPFDHIFFTGSTNVGKIVMTAAAKHLASVTLELGGKSPTIIDSEYDLMDAAKKIAVGKFVNAGQTCIAPDYLFIKKDVQDRFAGILQTVVNAGFMEDDHTPDRSKFTQIVNDRNFNRVKDLFDDAIKKGAEVVFGGVFDASDRTISPTVLKNVTPDMKIMQEEIFAPILPMMNYEDIDEVIDYVNDRDKPLALYVFSKNQDLIDNVLQHTTSGNAAINDVVVHFSDVNLPFGGVNTSGIGSYHGVYGFKEFSHEKGVFIQASK

SEQ ID NO: 906 - protein, 361 aa, Bacillus subtilis
  source 1..361: note = SBI04006_Endo-1,4-beta-glucanase
MEKLDKTLTMLKDLTDAKGIPGNEREVRQVMKSYIEPFADEVTTDRLGSLIAKKTGAENGPKIMIAGHLDEVGFMVTQITDKGFIRFQTVGGWWAQVMLAQRVTIVTKKGEITGVIGSKPPHILSPEARKKSVEIKDMFIDIGASSREEALEWGVLPGDMIVPHFEFTVMNNEKFLLAKAWDNRIGCAIAIDVLRNLQNTDHPNIVYGVGTVQEEVGLRGAKTAAHTIQPDIAFGVDVGIAGDTPGISEKEAQSKMGKGPQIIVYDASMVSHKGLRDAVVATAEEAGIPYQFDSIAGGGTDSGAIHLTANGVPALSITIATRYIHTHAAMLHRDDYENAVKLITEVIKKLDRKTVDEITYQ

SEQ ID NO: 907 - protein, 323 aa, Bacillus subtilis
  source 1..323: note = SBI04006_Phosphate acetyltransferase
MADLFSTVQEKVAGKDVKIVFPEGLDERILEAVSKLAGNKVLNPIVIGNENEIQAKAKELNLTLDGVKIYDPHTYEGMEDLVQAFVERRKGKATEEQARKALLDENYFGTMLVYKGLADGLVSGAAHSTADTVRPALQIIKTKEGVKKTSGVFIMARGEEQYVFADCAINIAPDSQDLAEIAIESANTAKMFDIEPRVAMLSFSTKGSAKSDETEKVADAVKIAKEKAPELTLDGEFQFDAAFVPSVAEKKAPDSEIKGDANVFVFPSLEAGNIGYKIAQRLGNFEAVGPILQGLNMPVNDLSRGCNAEDVYNLALITAVQAL

SEQ ID NO: 908 - protein, 395 aa, Bacillus subtilis; identical to SEQ ID NO: 770
  source 1..395: note = SBI04006_Acetate kinase

SEQ ID NO: 909 - protein, 445 aa, Bacillus subtilis
  source 1..445: note = SBI04006_Putative aldehyde dehydrogenase
MEQKVKDDIQRVFQLQKKQQKALRASTAEQRKEKLQRFLDSVIAHEEEIIEAIRKDVRKPYHEVKKAEIEGTKKAIRDNMNNLEQWMAPKEVGSSLNPEANGILMYEPKGVTLILGPWNYPFMLTMAPLAASLAAGNSAIVKLSDFTMNTSNIAAKVIRDAFAEKEVAIFEGEVEVATELLDQPFDHIFFTGSTNVGKIVMTAAAKHLASVTLELGGKSPTIIDSEYDLMDAAKKIAVGKFVNAGQTCIAPDYLFIKKDVQDRFASILQTIVNAGFMEDDRNPDRSKFTQIVNDRNFNRVKDLFDDAIEKGAEVVFGGVFDASDRTISPTVLKNVTPDMKIMQEEIFAPILPMMNYEDIDEVIDYVNDHDKPLALYVFSKNQDLIDNVLQHTTSGNAAINDVVVHFSDVNLPFGGVNTSGIGSYHGVYGFKEFSHEKGVLIQAAK

SEQ ID NO: 910 - protein, 473 aa, Bacillus subtilis
  source 1..473: note = SBI04006_3-polyprenyl-4-hydroxybenzoate decarboxylase
MAYQDFREFLAALEKEGQLLTVNEEVKPEPDLGAAARAASNLGDKSPALLFDNIYGYHNARIAMNVIGSWPNHAMMLGMPKDTPVKEQFFEFAKRYDQFPMPVKREETAPFHENEITEDINLFDILPLFRINQGDGGYYLDKACVISRDLEDPDNFGKQNVGIYRMQVKGKDRLGIQPVPQHDIAIHLRQAEERGINLPVTIALGCEPVITTAASTPLLYDQSEYEMAGAIQGEPYRIVKSKLSDLDVPWGAEVVLEGEIIAGEREYEGPFGEFTGHYSGGRSMPIIKIKRVYHRNNPIFEHLYLGMPWTECDYMIGINTCVPLYQQLKEAYPNEIVAVNAMYTHGLIAIVSTKTRYGGFAKAVGMRALTTPHGLGYCKMVIVVDEDVDPFNLPQVMWALSTKMHPKHDAVIIPDLSVLPLDPGSNPSGITHKMILDATTPVAPETRGHYSQPLDSPLTTKEWEQKLMDLMNK

SEQ ID NO: 911 - protein, 367 aa, Bacillus megaterium
  source 1..367: note = SBI04011_Endo-1,4-beta-glucanase
MKGVIHMTKLDETLTMLKALTDAKGIPGNEREPREVMKKYIAPYADEVTTDGLGSLIAKKVGNEQGPKIMVAGHLDEVGFMVTQIDERGFIRFQTVGGWWSQVMLAQRVTIVTSKGEVTGIIGSKPPHILPPEVRKKPVDIKDMFIDIGASSREEVAEWGVKPGDQVVPYFEFTVMNNEKMLLAKAWDNRIGCAIAIDVLKALKNETHENVVYGVGTVQEEVGLRGAKTSANFIEPDIAFAVDVGIAGDTPGVSDKEASSKMGDGPQIILYDASMVSHKGLRDTVVNVADELNIPYQFDAIAGGGTDSGSIHISANGVPALSITIATRYIHSHAAMLHRDDYENAVKLIAEVIKRLDRNTVNAITYN

SEQ ID NO: 912 - protein, 396 aa, Bacillus megaterium; identical to SEQ ID NO: 854
  source 1..396: note = SBI04011_Acetate kinase

SEQ ID NO: 913 - protein, 323 aa, Bacillus megaterium
  source 1..323: note = SBI04011_Phosphate acetyltransferase
MSDLFTGLKQKVSASDVSIVFPEGLDERVLGAVSRLAADNILKPIVVGNKDAVASKAAELNVKLDGVEVLDPQSYSEFDEMVAAFVERRKGKVTEEDARKILLDENYFGTMLVHMNKADGLVSGAAHSTADTVRPALQIIKTRQGVKKTSGVFIMVRGDQKYVFADCAINISPDSQDLAEIAIESARTAEMFDIDPRVAMLSFSTKGSAKSPETEKVANAVEIAKELAPSVTLDGEFQFDAAFVPSVAEKKAPGSVIKGDANVFVFPSLEAGNIGYKIAQRLGNFEAVGPILQGLNKPVNDLSRGCNEEDVYKLALITAAQAL

SEQ ID NO: 914 - protein, 473 aa, Bacillus megaterium
  source 1..473: note = SBI04011_3-polyprenyl-4-hydroxybenzoate decarboxylase
MAYKDFRDFLNTLHKEGQLLTVTDEVQPDPDLGSAGQAISNLGDQTPGLLFTNIYGYNNAKVALNVMGSWSNHALMMGLPKSTPVKEQFFEFARRYEKFPVKVKREETAPFHECEIKDDINLFDLLPLFRLNQGDGGYYLDKACVISRDQHDKENFGKQNVGIYRMQVKGKDRLGIQPVPQHDIAIHLKQAEEKGENLPVSIALGCEPAIVTAAATPLHYDQSEYEMAGAIQGEPYRIVKSQLSDLDVPWGAEVILEGEILAGEREYEGPFGEFTGHYSGGRSMPVIKINRVYHRKDPIFESLYIGMPWTETDYLIGINTSVPLYQQLKEAYPEEIEAVNAMYTHGLVAIVSTKSRYGGFAKAVGMRALTTPHGLGYCKLVILVDEDVDPFNLPQVMWALSTKMHPKHDVITVPNLSVLPLDPGSEPAGITDKMILDATTPVAPETRGHYSQPLDTPLETEKWEKILTNMMQK

SEQ ID NO: 915 - protein, 361 aa, Bacillus paralicheniformis; identical to SEQ ID NO: 886
  source 1..361: note = SBI04173_Endo-1,4-beta-glucanase

SEQ ID NO: 916 - protein, 395 aa, Bacillus paralicheniformis; identical to SEQ ID NO: 888
  source 1..395: note = SBI04173_Acetate kinase

SEQ ID NO: 917 - protein, 323 aa, Bacillus paralicheniformis; identical to SEQ ID NO: 887
  source 1..323: note = SBI04173_Phosphate acetyltransferase

SEQ ID NO: 918 - protein, 333 aa, Bacillus paralicheniformis
  source 1..333: note = SBI04173_UDP-glucose 4-epimerase
MSVLVLGGAGYIGSHAVYQLLDRDETVVVVDNLETGQRQAVHPEAVFYEGDVRDRDFLRTVFEKERIEEVIHFAASSLVGESMKDPLKYYDNNVSGTQVLLQTMLEHDVKKIVFSSTAAVYGEPESVPITEDMPTRPTSTYGETKLIMEKLMKRTEEAHGVSFVSLRYFNVAGARETGEIGEDHHPETHLVPIILQTALGQRPHITIFGDDYDTPDGTCIRDYVHVEDLIDAHLSALDYLREGGKSDIFNLGSSEGFSVKEMIDAARKVTGKDIPAEIGKRRAGDPSILIAGSDKAKQVLGWRPSRTSVAKIIEDAWKWHSSHPNGYRKEVST

SEQ ID NO: 919 - protein, 473 aa, Bacillus paralicheniformis
  source 1..473: note = SBI04173_3-polyprenyl-4-hydroxybenzoate decarboxylase
MAYQDFRDFLNTLKKEGQLLEVQEEVKPEPDLGAAARAANNLGDKSPALLFNNIYGYNNAQIALNVIGSWPNHALMLGLPKDTPVKEQFFEFARRYDQFPVKVQREETAPFHENDITEDINLFDILPLFRINQGDGGFYLDKACVISRDVEDPEHFGKQNVGMYRLQVKGKDRLGIQPVPQHDIAIHLRQAEERGENLPVTIALGCEPVIATAASTPLLYDQSEYEMAGALQGEPYKIVKSKLSNLDIPWGAEVVLEGEILAGEREYEGPFGEFTGHYSGGRSMPIIKIKRVCHRNNPIFEHLYLGMPWTEVDYMVGINTCVPLYQQLKEAYPNEIVAVNAMYTHGLIAIVSTKSRYGGFAKAVGMRALTTPHGLGYCKMVILVDEDVDPFNLPQVMWAISTKMHPKHDAVIIPDLSVLALDPGSEPAGITHKMILDATTPVAPETRGHYSQPLDSPIGTKEWEAKLMNLLNQ

SEQ ID NO: 920 - protein, 325 aa, Lactobacillus casei
  source 1..325: note = SBI04256_Phosphate acetyltransferase
MDLFESLKDKINGKNLRIVFPEGEDPRVLGAAVRLAADGLIQAIVLGNPDKIQTLAAAKSWDLSKLTVRDPANDDIHAKMVAAFVERRKGKATPEQAEKIVQDANYFGTMLVYMKEADGMVSGAVHSTADTVRPALQIIKTRPGVHLVSGAFIMQRGRDERYLFADNAINIDPDADQLAEIAVESAKTAALFDIEPPRVALLSFSTKGSAKGLQVDKVVEATKKAHELAPDLALDGELQFDAAFVPSVAKQKAPDSKVAGEANVFIFPELQSGNIGYKIAQRFGGFEAIGPILQGLNQPVSDLSRGANEEDVYKLAIITAAQTLL

SEQ ID NO: 921 - protein, 331 aa, Lactobacillus casei; identical to SEQ ID NO: 804
  source 1..331: note = SBI04256_UDP-glucose 4-epimerase

SEQ ID NO: 922 - protein, 245 aa, Lactobacillus casei
  source 1..245: note = SBI04256_Lysozyme M1
MRSRVIYADTYRKRHQRRLFLLAVLIIALGALFVWWHQRNPRPDPQTYPVLGVRLDQTDGVQDFDSLRSSKVSFVYLKATEGSSYFDDNFNTNFNQAAGSRLSIGIYHVFSFETTPQAQAAQFTRQVGQNIGDLPIGIYLSYYTEKKPSTQWLTTHLQTFVTLVQQHYHRQVLLMGSPSILKAVQKVDPQAPRWVVSDKKPTTSSGFWQYTSGARLPNGPHADYRAAVFMGDRAAFLKLSQQIVN

SEQ ID NO: 923 - protein, 371 aa, Lactobacillus casei
  source 1..371: note = SBI04256_UDP-galactopyranose mutase
MKLLVVGAGLFGATVARERARKGDKVDVIEKRDHLAGNAYTEEIEGIQVHRYGAHIFHTSNKTVWKYVNQFAEFNRFTNEVIANYQGEIYNLPFNMNTFNKMWGVITPAEAASKIAEQRLAMSGKQPQNLEEQAISLVGTDIYNKLIKAYTAKQWGRDPKDLPAFIIRRLPVRLTFDNNYFDDLYQGIPIGGYTQIVEKMLDQPNITVQLNTDFLQNKAEYLKRYDQIVYTGMIDEFFDYQLGTLEYRSLRFETELLNMANFQGNAVVNYTDAETPFTRIIEHKHFEFGKSNPGKTVITREYPVNWSRGDEPYYPVNNSENNHLFKKYREFASINMPQVAFGGRLGLYRYYNMDQVLAAALQFLDGDFFAS

SEQ ID NO: 924 - protein, 211 aa, Lactobacillus casei; identical to SEQ ID NO: 805
  source 1..211: note = SBI04256_N-acetylmuramoyl-L-alanine amidase

SEQ ID NO: 925 - protein, 338 aa, Weissella cibaria
  source 1..338: note = SBI04259_Pyruvate oxidase
MAQKPGTEALANADTVLFVGSNFPFAEVANSFKNTKHFMQIDIDTAKLGKRHKADVALLADAKVALGALLDVLPERVETGWYKANAQNVVNWRAYLNKLETKTEGDLQLYQVYNQINRVKTDDAIFSLDVGDVNQTSNRHLHLTDTNRHFTSNLFATMGVGIPGAIAARLNNADKQVWSLSGDGGAAMVMQDLVTQVQYKLPVINVVFSNNQFGFIKDEQEDTNKGYIGVEFNDIDFSKVAEAVGMQGFRVTKISELADVFDQAVALGKTEPVLIDARISGDRPIPTEALQLDPTTNTPEEIAAFKARFEAEDLQPLRDFLVANDVVVGDANVENGGF

SEQ ID NO: 926 - protein, 260 aa, Weissella cibaria
  source 1..260: note = SBI04259_Pyruvate oxidase
MSEQAEMIPAGIAMVKVLEAWGVDHLYGIPGGSFNSTMDALLAEKDNIQYIQVRHEEVGAMAAAADAKLTGKIGVAFGSAGPGGTHLLNGLYDAREDHVPVLALIGQFGTSGMNMDTFQEMNENPIYADVSVYNVTAVTAQSLPHLIDEAIRRAYAQHGVAVVQIPVDLPWQDIPAESWYASANSYQQPLLPQPDPDKVKQIATLLEQAERPVIYFGIGTRGAGQTLQDISNKFKIPLISTYPAKAIVPDDFPLYLGSTL

SEQ ID NO: 927 - protein, 330 aa, Weissella cibaria
  source 1..330: note = SBI04259_UDP-glucose 4-epimerase
MAILVLGGAGYIGSHMVDTLLSDGRDVVVVDNLLTGHRAAVPAGVPFYEVDIRDKAALREVFEKENIEQVVHFAASSIVPESMADPLKYFDNNTAGMIALLEVMLEFDVKQIVFSSTAATYGIPEENPIKETTPQNPINPYGESKLQMEHIMKWADDAYGLKWVALRYFNVAGAKADGSIGEDHPVETHLVPIILQTALGQREKIMMFGDDYNTPDGFNVRDYVHVMDLANAHVLALDYLAKGNESNQFNLGSANGFSVKQMVEAAREATGKEIPAEVGPRRAGDPDSLVASSAKAREVLGWAPKYDDVKEIIKTAWTWHQQHPHGYEDR

SEQ ID NO: 928 - protein, 392 aa, Weissella cibaria
  source 1..392: note = SBI04259_UDP-galactopyranose mutase
MTLNDKNYDYLIVGAGPFGSIFAYEAAKRGKRSLIIEKRAHIAGNMYTHTEHGITVHDFGAHIFHTDNKEVWDYIRQFAEFNGYQNQVVANYKGTLYNLPFNMNTFYEMWGTKTPAEAKAKIEEQKAAALTDLGDREPRNLEEQAISLIGTDIYEKLIKGYTEKQWGRKATELPAFIIKRLPVRFIYDNNYFNHRYQGIPIGGYTQIFEKMLDNDLIDVRLNSDFFEHKDEYIAEFPRILYTGMIDQFFDYKFGELEYRSLRFEQEVIESDNYQGNSVINYTDAETPYTRVMEWKHFDGLSDDGVTIITKEYPQTWDRTKEAYYPVNDEKNTNLYKEYAKEARQHKDQFIFGGRLGQYRYFDMDQVFNAALNEVRKEFKISSSFNFAHDEEH

SEQ ID NO: 929 - protein, 80 aa, Pediococcus ethanolidurans
  source 1..80: note = SBI04873_Phosphate acetyltransferase
MPDVGASKAPGSKVAGHATVFVFPELQSGNIGYKIAQRLGHFEAIGPILQGLNAPVSDLSRGASEEDVYKVAIMTAAQVR

SEQ ID NO: 930 - protein, 400 aa, Pediococcus ethanolidurans
  source 1..400: note = SBI04873_Acetate kinase
MEKTIAINAGSSSFKFKLFEMPSEKVLASGQVDRIGIDGSTFTIIYGDQQNIRIEKPVKNHEVAINIVLNALIDLKIIRSYDEITGVGHRVVAGGEIFKGSVLITEKVIKQIESLSEYAPLHNPANVLGIRAMQKVLPNVTSVAVFDTSFHETLPPKNYLYSIPYEYYEKYGARKYGAHGTSHQFVALDAAKLLGKPLSSLKMITLHLGAGSSIDAILNGQSYDTSMGFTPVSGITMATRSGDIDVSLVNYLMEKLKITDFSEMIKILNTKSGLLGISGISSDMRDVLEARHKSRRAELAVEIFVNNIVKYIGAYIAEMHGIDALVFTAGTGENGMLVRKMIVDELDYFGLKIDDERNQVQGELRDISASDSKAKVLVVPTNEELAIAREVERFKQENKD

SEQ ID NO: 931 - protein, 331 aa, Pediococcus ethanolidurans
  source 1..331: note = SBI04873_UDP-glucose 4-epimerase
MSVLVLGGAGYIGSHMVKRLVEQNEDVVVIDNLVTGHRQAVDKQARFYKGDVRDRAFLDQVFQKESIDTVIHFAAFSIVPESMKDPLKYFDNNTGGVITLLEAMHANHVSRIVFSSTAATYGNPEHATIKETDIQAPINPYGESKLMMEKIMHWADIAYGIKFVALRYFNVAGAADDGSIGEDHHPETHLIPIVLQVAAGKRAELQIYGDDYATADGTNVRDYVHVTDLADAHILAMKYLQAGNDSNAFNLGSSTGFSVKQILEAARQATGKEIPAKIAARRPGDPDTLVAKSDKAREVLKWQPKYDDIHEIIKTAWNWTQKHPNGFEEEN

SEQ ID NO: 932 - protein, 193 aa, Pediococcus ethanolidurans
  source 1..193: note = SBI04873_N-acetylmuramoyl-L-alanine amidase
MSGVISLVLVFGLLVVLFVQLVPKISFTNSTPATNLNTQNHQKFIKTIAPYAQTMHTKYGVLPSITIAQAILESDWGTSQLSRDYNNCFGIKGTIYQTTKEMKTQEFVNGKWITVTARFRVYNSWKDSVKDHTLLFVNGTNWNKNQYQSVRTATDYKTAAKALYTAGYATDPGYPAKLINLIQTYDLEKYDPQ

SEQ ID NO: 933 - protein, 371 aa, Pediococcus ethanolidurans
  source 1..371: note = SBI04873_UDP-galactopyranose mutase
MNYLVVGSGLFGSVFAYEAAKRGNHVRVIEKRDHIAGNIYTKEIDGIQVHEYGAHIFHTKMPKIWEYINRFADFNNYVNTPIANYNGEIYNMPFNMNTFNKLWGVVTPEEAQNKIEEQKKSVKLSGKPQNLEEQAISLVGPDVYNKLVKGYTEKQWGQDATKLPAFIIRRLPVRFTYNNNYFDDPYQGIPIGGYTQIIEKMLASNLISVKTNTDFFSSKDAYLKSDTRIIFTGMIDQFFDYTLGELEYRSLKFETEIKNVNNYQGNAVVNYTDAKTPYTRIIEHKHFEFGNGNKNKTVITHEYPKTWYRGDEPYYPINNKRNKELYTRYVELAKKSAPNVVFGGRLGQYRYYNMDQTIMAALQTVKKEFGE

SEQ ID NO: 934 - protein, 193 aa, Pediococcus ethanolidurans
  source 1..193: note = SBI04873_dTDP-4-dehydrorhamnose 3,5-epimerase
MGKLKITTTKLQDVKIIEPAIFGDQRGFFTETYSDRDFKEAGINFDFIQDNQSLSSQAGVLRGLHFQRGKAAQTKLIRVVTGAVLDLIVDVRKGSPTYKQWEGYIISASNHRQLLVPKGFAHGFVTLTNDVNFLYKCDNYYNAEADGGFSFKTPELGIKWPIDFDQAITSEKDAKQPTFTEFEKNNPFVYGEI

SEQ ID NO: 935 - protein, 290 aa, Pediococcus ethanolidurans
  source 1..290: note = SBI04873_Glucose-1-phosphate thymidylyltransferase
MTGIILAGGSGTRLYPITEAISKQLVPIYDKPMIYYPLSTMMLAGIKDILLISTPRDTPRFKELFGDGSQFGLNISYKVQEKPNGLAEAFVLGADFIGDDSVCLILGDNIYYGSGLSELVQRSAKKKQGATVFGYQVNDPERFGVVEFDKDHHVKSIEEKPEHPASNYAVTGMYFYDNQVVEIARNLKPSPRGELEITDINKEYLKRGQLDVELLGRGYAWLDTGTHESLHEASGFIETVEKRQNLKVACLEEVAYRMGYIDKDQVYKLAQPLKKNDYGQYLLRLIQEDE

SEQ ID NO: 936 - protein, 324 aa, Lactobacillus buchneri
  source 1..324: note = SBI04874_Phosphate acetyltransferase
MELFESLKQKIKGKNISIVFPEGDDVRILGAASRLAKDGLVNPVILGAKDTVEKVAKDADIDLGNVEIIDYLNQPADQIDEMVAAIVERRKGKTDEAKARDWLKDPNYFGTTLVYMNKINGMVSGANHPTGDTVRPALQIIKTKPGVKLISGAFIMQKGDERYLFADCAINLDPDANALAEIAVESGKVAKTFDIDPKVALLSFSTKGSAKGDMVTKVQEATKLAQEQAPDMAIDGEMQFDAAFVPTVAEKKAPGSKVAGKATVFVFPELQSGNIGYKIAQRFGGFEAIGPILQGLNKPVSDLSRGSNEEDVYKVAIITAAQAL

SEQ ID NO: 937 - protein, 144 aa, Lactobacillus buchneri
  source 1..144: note = SBI04874_Pyruvate oxidase
MTKMIAGQALVKVLEDWGVDHVYGIPGGSINHTVEGLYLEKDKMKYIQVRHEEVGAIAASADAKFTGKIGVASGSAGPGATHLFNGLYDAKMDHVPVLALVGQVPQPTMNTNYFQEMDETPMFSDVSVYNKQVTTADQIPYVVN

SEQ ID NO: 938 - protein, 334 aa, Lactobacillus buchneri
  source 1..334: note = SBI04874_UDP-glucose 4-epimerase
MAILVLGGAGYIGSHTVDRLIENGYDVAVVDNLVTGHKAAINPKARFYEGDVRDKDFMNQVFDKEEIEGVIHFAAFSVVPESMEKPLKYFDNNTGGMISLLEVMNAHNVKKIVFSSTAATYGEPKQIPIKETDPQVPTNPYGESKLAMEKIMHWSDVAYGIKFVALRYFNVAGAKPDGSIGEDHHPETHLVPIILQVAAGERDELTIFGDDYDTPDGTNVRDYVHVLDLADAHILALKYLQAGHDSDAFNLGSSTGFSNKQMLDAARDVTGKPIPAKMGPRRAGDPSTLIAASDKARKILGWKPQFDDVHEIIKTAWNWKETHPKGYDDRKGNQ

SEQ ID NO: 939 - protein, 361 aa, Bacillus amyloliquefaciens; identical to SEQ ID NO: 871
  source 1..361: note = SBI04877_Endo-1,4-beta-glucanase

SEQ ID NO: 940 - protein, 323 aa, Bacillus amyloliquefaciens; identical to SEQ ID NO: 873
  source 1..323: note = SBI04877_Phosphate acetyltransferase

SEQ ID NO: 941 - protein, 395 aa, Bacillus amyloliquefaciens; identical to SEQ ID NO: 872
  source 1..395: note = SBI04877_Acetate kinase

SEQ ID NO: 942 - protein, 330 aa, Bacillus amyloliquefaciens; identical to SEQ ID NO: 874
  source 1..330: note = SBI04877_UDP-glucose 4-epimerase

SEQ ID NO: 943 - protein, 445 aa, Bacillus amyloliquefaciens; identical to SEQ ID NO: 875
  source 1..445: note = SBI04877_Putative aldehyde dehydrogenase

SEQ ID NO: 944 - protein, 473 aa, Bacillus amyloliquefaciens; identical to SEQ ID NO: 876
  source 1..473: note = SBI04877_3-polyprenyl-4-hydroxybenzoate decarboxylase

SEQ ID NO: 945 - protein, 399 aa, Pediococcus pentosaceus
  source 1..399: note = SBI04880_Acetate kinase
MEKTIAINAGSSTLKFKLFEMPEERVISSGTVDRIGISGSNFTIKTTDGKKVEIDQPIKNHEEAVNLLLKELLKLDIIKDYSEITGVGHRVVAGGEIFQDSALIDDKVLKQIEDLKEYAPLHNPANATGIRAFKKVLPDITSVAVFDTSFHETLPEKNYLYSIPYEYYEKYGARKYGAHGTSHQYVAGRAAKMMGKPLEELKIITLHLGAGSSITAIKDGKSFDTSMGFTPLAGITMATRSGDIDASLVVYLMQKLNITNPEDILTILNKKSGLLGLSGMSPDLRDIIDAAEKGEHRAQMAIDIFVNNIVKYIGSYATEMGGLDGIVFTAGIGENSVPMREKITSKLGIFNVKLDQALNEKRGERFISAEDSAVQVMVIPTDEELAIARDVEKFKKMGD

SEQ ID NO: 946 - protein, 373 aa, Pediococcus pentosaceus
  source 1..373: note = SBI04880_UDP-galactopyranose mutase
MQEYLVVGSGLFGSVFAHEAAKRGHKVKVIEKRDHVAGNIYTKEVEGIQVHQYGAHIFHTSMKNVWDYVNQFAEFNNYINTVVANYNGEIYSMPFNMYTFNKLWGVITPDEAKAKIEEQKKSVKLDGKPANLEEQAISLVGPDVYQKLVKGYTEKQWGQAATDLPSFIIRRLPVRFTYDNNYFNDPYQGIPVGGYTQIIEKMLDHELIEVETGVDFFDHKEEYINSGAKIIFTGMIDQFFDYELGELEYRSLRFETEVKDVDDYQGNAVINYTDAETPYTRVIEHKHFEFGKGNKNKTVVTHEYPKTWKRGDEPYYPINNKRNKELYTKYVELAQAKAPSVLFGGRLGQYRYYNMDQTIMAALQTVEHEFEEK

SEQ ID NO: 947 - protein, 330 aa, Pediococcus pentosaceus
  source 1..330: note = SBI04880_UDP-glucose 4-epimerase
MSILVVGGAGYIGSHMVKRLVEQNRDVVVVDNLSTGHRGAVDKGVKFYEGDIRDHAFLKEVFDQEAIDTVVHFAAFSIVPESMEKPLKYFDNNTAGMVALLEEMRDHDVKRIIFSSTAATYGVPEKSPIEETDRQAPINPYGESKLMMEKIIKWTDQAYGIKFVALRYFNVAGAYPDGSIGEDHGPETHLTPIILQVALGKRDQLQIFGDDYHTPDGTNVRDYVHVLDLADAHILAIDYLKAGNDSDVFNLGSSTGFSVKEMVEAAREATGEAIPAKIAARRPGDPDSLIAASQKARKILKWNPQYDDVKEIIKTAWNWTQKHPNGYEDR

SEQ ID NO: 948 - protein, 334 aa, Pediococcus pentosaceus
  source 1..334: note = SBI04880_UDP-glucose 4-epimerase
MAVLVLGGAGYIGSHAVDRLITKGYDVAVVDNLVTGHRAAVNQQARFYEGDVRDAEFMDSVFTKEDVEGVIHFAAFSVVPESMKNPLKYFDNNTAGMVKLLEVMAKHDVKRIVFSSTAATYGEPERVPIQESDPQVPTNPYGESKLAMEKIMHWSDVADGIKFVALRYFNVAGAKPDGSIGEDHQPETHLVPIILQVAAGERDQLQIFGDDYPTADGTNVRDYVHVVDLADAHILALEYLKQGHDSNAFNLGSSTGFSNRQMLEAAREVTGKEIPAVMAPRRAGDPSTLIAASDKAREILGWQPQYDDVKEIIKTAWNWKVNHPAGYDDRGGQA

SEQ ID NO: 949 - protein, 324 aa, Lactobacillus buchneri; identical to SEQ ID NO: 936
  source 1..324: note = SBI04881_Phosphate acetyltransferase

SEQ ID NO: 950 - protein, 334 aa, Lactobacillus buchneri; identical to SEQ ID NO: 938
  source 1..334: note = SBI04881_UDP-glucose 4-epimerase

SEQ ID NO: 951 - protein, 398 aa, Enterococcus gilvus
  source 1..398: note = SBI04884_Acetate kinase
MSKTIAINAGSSSLKWQLYQMPEESVIAKGIVERIGLNDSIFTIKYGEGEKFEQVLDIKDHEVAVQMLLDQLLELKIIASFDEITGVGHRVVAGGEYFKDSVLIDDDVLAKIEELSEFAPLHNPANAMGIKAFRHILPNVTSVAVFDTSFHATMPAVNYLYSIPKEYYDKYAARKYGFHGTSHRYVSERAAELLGKPIEETKIITAHIGNGGSVTAVEGGKSVDTSMGFTPLAGLTMGTRAGDIDASLLPYLMEKAGIKDINEMIDVLNKKSGVLGLTGISSDMRDIENGAEEGNADAILALEIYCDRIRKYIAQYISVMNGVDAIVFTAGVGENADPVRSMVLENMTWFGIEIDEEINKSIHGKEAELSTENSRVKVFVIPTDEEVMIARDVERLSK

SEQ ID NO: 952 - protein, 326 aa, Enterococcus gilvus
  source 1..326: note = SBI04884_Phosphate acetyltransferase
MELFDSLKFKIIRRNIKVAFPEATDARILGAASRLKAEELIEPVLIGNLAEIEKAAGARGIALSNFTIIDPDHFDRWDEMVESFVERRKGKVSKEDAEKILKDENYFGTMLTYMGITDGMVSGAIHSTGDTVRPALQIIKTKPGVSRTSGAFLMVRGRDQEKYLFSDCAINVNPTAQELAEIAVESAKTAELFDIEPKVAMMSFSTKGSAKSPEVEKVAEATTIAQELAPEFLIDGELQFDAAYIPGVAQLKAPESQVAGQATVFVFPELQSGNIGYKIAQRFGGFEAIGPVLQGLNKPVSDLSRGCNEEDVYKLSIITAAQSLMN

SEQ ID NO: 953 - protein, 289 aa, Enterococcus gilvus
  source 1..289: note = SBI04884_Glucose-1-phosphate thymidylyltransferase
MKGIILAGGSGTRLYPLTKATSKQLMPVYDKPMIYYPMSTLMLAGINEILIISTPQDTPRFENLFGDGHELGIHIEYAVQDSPDGLAQAFIIGEEFIGDDSVCLVLGDNIYYGDGLSRMLQRAAKKTEGATVFGYHVNDPERFGVVEFDDDMQAVSIEEKPEKPKSHYAVTGLYFYDNEVVEIAKNIQPSERGELEITDVNKEYLKRNKLSVEVMSRGFAWLDTGTHESLLEASTFISTIEKRQNLKVACLEEISYRMGYITKEQLVELAQPLKKNQYGQYLLRLAEED

SEQ ID NO: 954 - protein, 193 aa, Enterococcus gilvus
  source 1..193: note = SBI04884_dTDP-4-dehydrorhamnose 3,5-epimerase
MGKIKVTETNLTDVKIIEPAVFGDHRGFFTESYSVEDFKAAGIDFDFIQDNHSLSTQPGVLRGLHFQKGASAQTKLIRVVTGAVLDVIVDIRKGSPTYGKWEGYILSEHNHRQLLVPRGFAHGFVTLTPNVNFMYKCDNYYDAEADGGISFADPDLAIEWPIAIEKAITSEKDAKQPTLKEFEAENPFVYGEI

SEQ ID NO: 955 - protein, 281 aa, Enterococcus gilvus
  source 1..281: note = SBI04884_dTDP-4-dehydrorhamnose reductase
MILITGGHGQLGTELRHLLDEKKIEYVSTDADQLDITDKEGTYKFITEMKPELIYHCAAYTAVDKAEDEGKELDELINVDGTRNVAEAAKAAGATLIYISTDYVFDGTKKDGMYQVGDATNPLSEYGRTKLLGEQAVQEIMKDYYIIRTSWVFGIYGHNFIYTMQNLAKTHDRLTVVNDQFGRPTWTRTLAEFMTFVIETNAPFGVYHLSNENSCSWYEFAKEILKDTKVEVAPVTSEEYPQKATRPQYSIMDLSKAKALGFEIPTWQEALASFLELEAKQ

SEQ ID NO: 956 - protein, 329 aa, Enterococcus gilvus
  source 1..329: note = SBI04884_UDP-glucose 4-epimerase
MAILVLGGAGYIGSHTVDKLVSQNYEVVVVDNLLTGHRKAVHPKATFYEGDCRDKTFMRDVFTKESIEGVVHFAASSLVGESVEKPLKYFNNNVVGMESLLEVMEEFEVKNIVFSSTAATYGEPGVSPITEEVATNPTNPYGESKLMMEKMMKWCDNAYGMRYVALRYFNVAGAKADASIGEDHDPETHLVPIILQVALGQRDHLTIFGEDYDTPDGTCIRDYVQVEDLAAAHILALEYLNAGNPSNFFNLGSNNGYSVKEMLDAAREVTGKEIAAEVGPRRAGDPSRLVASSEKVKETLGWNPEYTDIKAIIETAWNWHVSHPHGYED

SEQ ID NO: 957 - protein, 370 aa, Enterococcus gilvus
  source 1..370: note = SBI04884_UDP-galactopyranose mutase
MNKYIVVGSGLYGSVFANEASKKGHKVKVIEKRNHIAGNIYTENIEGIQTHMYGAHIFHTSDKEVWEYVNQFAHFNRYTNSPIASYHGEIYNLPFNMNTFNKLWGVTTPEEAQEKIEKQRSILKGKKPTNLEEQAISLVGIDIYRKLIKEYTEKQWGRPCKELPSFIIKRLPVRMTYDNNYFNDSFQGIPIGGYTQIVEKMLDHPNIEVFLNTDFFDIKEDLELEADKIIYTGMVDQFFNYRFGKLDYRSLKFTHNILNQENHQGSAVVNYTDKAHKYTRIIEHKHFEFGNQPKTIITKEYPLDWNNGEEPYYPINDEKNNSIYEQYKKLVREKDQYIFGGRLGTYKYFDMHMIIRAALDDAKKELEGSK

SEQ ID NO: 958 - protein, 494 aa, Enterococcus gilvus
  source 1..494: note = SBI04884_Aldehyde dehydrogenase
MNDKVQLKDQYSLFIDGKWTAYDAERALLAINPANGDCLAKFTDATDDEVDLAVTAANNALKEWRKVSIEERSRILLKIADIIDEHAEHLALVETLDNGKPLRETQTIDIPYGADHFRYFAGVLRSEEGTAQQLDETTLTINLKEPIGVVGQIIPWNFPFLMAAWKIAPALAAGNTIIIHPSSTTSLSILEFARLIQEVLPPGVLNVVTGKGSKSGEYMLHHEGIDKLAFTGSTEVGYNVAISAAKRLVPATLELGGKSANIFFNDMPYEKALDGAQLGILFNQGQVCCAGSRIFVQSGIYDRFVKDLAEAFNKVNVGLPWEEGIQMGAQINENQVKTILKYIDIAKEEGAAIKAGGTRLDTNGLEKGCFVAPTLITNVTNDMRVAKEEIFGPVAVVIKFDEIDEVIEMANDSIYGLGGGVWTKDLNTALTVSRALETGRVWVNTYNQIPAGAPFGGYKKSGIGRETYKSMLDAYSQTKNIMIDTNNEPSGFYS

SEQ ID NO: 959 - protein, 325 aa, Lacticaseibacillus paracasei
  source 1..325: note = SBI04887_Phosphate acetyltransferase
MDLFESLKDKINGKNLRIVFPEGEDPRVLGAAVRLAADGLIQAIVLGNPDKIQTLAAAKSWDLSKLTVRDPANDDIHAKMVASFVERRKGKATPEQAEKIVQDANYFGTMLVYMKEADGMVSGAVHSTADTVRPALQIIKTRPGVHLVSGAFIMQRGRDERYLFADNAINIDPDADQLAEIAVESAKTAALFDIEPPRVALLSFSTKGSAKGPQVDKVVEATKKAHELAPDLALDGELQFDAAFVPTVAKQKAPDSKVAGEANVFIFPELQSGNIGYKIAQRFGGFEAIGPILQGLNQPVSDLSRGANEEDVYKLAIITAAQTLL

SEQ ID NO: 960 - protein, 245 aa, Lacticaseibacillus paracasei
  source 1..245: note = SBI04887_Lysozyme M1
MRSRVIYADTYRKRHQRRLFLLAVLIIALGALFVWWHQRNPRPDPQTYPVLGVRLDQTDGVQDFDSLRSSKVSFVYLKATEGSSYFDDNFNTNFNQAAGSRLSIGIYHGFSFETTPQAQAAQFTRQVGQNIGDLPIGIYLSYYTEKKPSTQWLTTQLQTFVTLVQQHYHRQVLLMGSPSILKAVQKVDPQAPRWVVSDKKPTTSSGFWQYTSGARLPNGPHADYRAAVFMGDRAAFLKLSQQIVN

SEQ ID NO: 961 - protein, 370 aa, Lacticaseibacillus paracasei
  source 1..370: note = SBI04887_UDP-galactopyranose mutase
MKILVVGSGLFGAVSAHELAKKGHDITVIEKRNHIAGNIYTKDVAGIQVHEYGAHIFHTVNPKIWQYVNQFADFNRYTNEVVANYHGELYNLPFNMNTFYRMWGVTTPNEAEAKIEQQRAVLNGKKPTNLEEQAISLVGTDIYNKLVKDYTTKQWGRAPKDLPAFIIRRLPVRFTFDNNYFNDPYQGIPIGGYTQIVEKLLDDPHITTQVNTDFFSAKDDYLRNYDHIIFSGMIDQFFNYRFGELGYRSLRFETKLLEEPNYQGNAVINYTDAETPYTRIIEHKWFEFGNGNKQQTVITHEYPQQWKRGVEPYYPINDSANNHLFKQYREYADANTPNVTFGGRLGLYRYYNMDQVIAAALQFIETSQKF

SEQ ID NO: 962 - protein, 211 aa, Lacticaseibacillus paracasei; identical to SEQ ID NO: 805
  source 1..211: note = SBI04887_N-acetylmuramoyl-L-alanine amidase

SEQ ID NO: 963 - protein, 331 aa, Lacticaseibacillus paracasei; identical to SEQ ID NO: 804
  source 1..331: note = SBI04887_UDP-glucose 4-epimerase

SEQ ID NO: 964 - protein, 374 aa, Lacticaseibacillus paracasei
  source 1..374: note = SBI04887_UDP-galactopyranose mutase
MKLLVVGAGLFGSTVARERALKGDSVDVIEKRDHLAGNIYTEDIEGIQVHRYGAHIFHTSNQKVWEYINQFATFNRYTNEVIANYKGEIYNLPFNMNTFNKMWGVITPEEAEKKIDEQRAAMAGKKPENLEEQAISLVGTDIYSKLIKDYTAKQWGREPKELPAFIIRRLPVRFTYDNNYFNDLYQGIPVGGYTQIVEKMLDVPNITVKLNTDFLENKQDYLNRYDKVIYTGMIDQFFDYQLGTLEYRSLRFDTEVLDTDNFQGNAVVNYTDSETPFTRIIEHKHFEFGKGNRGKTVITHEYPANWTKGDEPYYPVNNSENNHLFTQYRELATQETPQVAFGGRLGLYRYYNMDQVITAALQFLQGDFFAAQNK

SEQ ID NO: 965 - protein, 603 aa, Lactobacillus plantarum
  source 1..603: note = SBI04889_Pyruvate oxidase
MVMKQTKQTNILAGAAVIKVLEAWGVDHLYGIPGGSINSIMDALSAERDRIHYIQVRHEEVGAMAAAADAKLTGKIGVCFGSAGPGGTHLMNGLYDAREDHVPVLALIGQFGTTGMNMDTFQEMNENPIYADVADYNVTAVNAATLPHVIDEAIRRAYAHQGVAVVQIPVDLPWQQIPAEDWYASANSYQTPLLPEPDVQAVTRLTQTLLAAERPLIYYGIGARKAGKELEQLSKTLKIPLMSTYPAKGIVADRYPAYLGSANRVAQKPANEALAQADVVLFVGNNYPFAEVSKAFKNTRYFLQIDIDPAKLGKRHKTDIAVLADAQKTLAAILAQVSERESTPWWQANLANVKNWRAYLASLEDKQEGPLQAYQVLRAVNKIAEPDAIYSIDVGDINLNANRHLKLTPSNRHITSNLFATMGVGIPGAIAAKLNYPERQVFNLAGDGGASMTMQDLATQVQYHLPVINVVFTNCQYGFIKDEQEDTNQNDFIGVEFNDIVFSKIADGVHMQAFRVNKIEQLPDVFEQAKAIAQYEPVLIDAVITGDRPLPAEKLRLDSAMSSAADIEAFKQRYEAQDLQPLSTYLKQFGLDDLQHQIGQGGF

SEQ ID NO: 966 - protein, 325 aa, Lactobacillus plantarum; identical to SEQ ID NO: 775
  source 1..325: note = SBI04889_Phosphate acetyltransferase

SEQ ID NO: 967 - protein, 397 aa, Lactobacillus plantarum
  source 1..397: note = SBI04889_Acetate kinase
MGKTIAINAGSSTLKFKLFEMPQERVIAQGAVERIGFKTSPVNIRYGVDHHYQEKAVVADHLAAVNIVLDELIKLRIIDSYDEITGVGHRVVAGGEQFHDSVLITDQVLKQITDLAEYAPLHNPANAVGIRAFKRVLPHVPAVAVFDTAFHASMPAVNYLYSLPYDYYQRYGARKFGAHGTSHRYVAVRAAKLLGRPLETLKLITLHLGAGSSITAIDHGQSLDTSMGFTPLAGITMATRSGDVDPSLVAYLMKKLNISDPDEILTILNTQSGLLGLAGSADMQELEARYDEDSQAQLAIDIFVNRIVKYVGAYLAELQGADALVITAGIGERDARMRQRIADRLTYFGVAIDPTKNQVSGVERDLSTTDAKIRTLLIPTDEELMIARDVERVAQNQ

SEQ ID NO: 968 - protein, 334 aa, Lactobacillus plantarum
  source 1..334: note = SBI04889_UDP-glucose 4-epimerase
MAVLVLGGAGYIGSHAVDRLVAKGYDVAVVDNLVTGHRAAVNEHARFYEGDVRDTVFMNTVFDQENVEGVIHFAAFSVVPESMKDPLKYFDNNTAGMVKLLEVMAKHDVKKIVFSSTAATYGEPKQVPIKESDPQVPTNPYGESKLAMEKIMHWSDVAYGIKFVALRYFNVAGAKPDGSIGEDHAPETHLVPIILQVAAGERDQLQIFGDDYPTPDGTNVRDYVHVVDLADAHILALEYLKQGHDSDAFNLGSSTGFSNKQMLDAAREVTGKPIPAIMAPRRAGDPSTLVAASDKARTVLGWTPQYDDVKEIIKTAWTWKESHPAGYDDRGGQA

SEQ ID NO: 969 - protein, 505 aa, Lactobacillus plantarum
  source 1..505: note = SBI04889_Poly(Glycerol-phosphate) alpha-glucosyltransferase
MTVCFTFINEYILGKNSSVEHAAINRVKLFNHYKAPAQIVTKMYDRLLHQTMGTFQLANQQVLNMFDYFQQTTDVPTKVLHTDDMHLPVEYAVEVGANFSKIFNGDEHVSNVGFIPGTIGRVFYQEFFDNQGNLSSTDLWDWRGFKSSTQYFGQNGKLVLERFYNLQGETVIEQYYVPDTNGNPLASRLILKNYRDQAERFFQDANHLFRFFLAELSHLDKQTTTFISDRPGTSVKPLLELQDDSHKYVTVPIYQAKDINDPIHSPLDGFLTPAFDNLQHFDGFITATESQAQHLRTRFPKAKVTVLPTVTTSPLAQSKLQPITARPKQLLYVGRLAPDRQLNQLIRTIALVKQQVKEIQCDFYGYGDPEYLKTLNKLVEELKLTNNVHLLDYHPDLETRYDDYQLLLNTDIVDGGPMSMPEAMSHGIPVISYRFNYGPKDWIDDGHDGFIVDPGNQLALRDRVIELMTDTKKLTAFSEAAFKKLHTSQTDLKVWHRWQQLLGIK

SEQ ID NO: 970 - protein, 331 aa, Lactobacillus plantarum
  source 1..331: note = SBI04889_Glycosyltransferase
MQNPRLTIIVPCYNEEAVLPKSAHILDGILTDLIQHKQVNAASKLLFVDDGSQDKTWKLIKSLEKQYSTVTGLKFSRNFGHQNALMAGMQVASPTAEIVITIDADLQDDPQVIPEMVARYRAGSDIVLGVRNDRSSDSLFKRWTADGFYRLMERIGVQLVPNHADFRLLSQRAVQALLTYEETNLFLRGIVPRLGFPTTKLYYHRQPRFASVSKYPLRKMVAFAFDGITSFSIAPIKVILLFGMVISGGSLMMMLYALIQGLLGTATSGWSSLMTSLWFLGGMQLIGISIVGEYVGKIFAEVKHRPRYIIETDDYTATQQPAIVNSQRVHG

SEQ ID NO: 971 - protein, 185 aa, Lactobacillus plantarum
  source 1..185: note = SBI04889_exopolysaccharide biosynthesis protein
MEQVITFDFIVKLIRQYWKVLLSLMILGGTIATVVTLWVIQPEYQANVQILVNRKHSSAGADLTGQQADVQMITTYKELITKPVVLKPARQTLMAETDIRRSLESLKQTVSVTSTANSQVFSIVVRDKNAKASAMIANQIAATFKDQDQHIIRVNNVTIVAPAETPDQPVAPKKIINILIGFVGG

SEQ ID NO: 972 - protein, 235 aa, Lactobacillus plantarum; identical to SEQ ID NO: 781
  source 1..235: note = SBI04889_exopolysaccharide biosynthesis protein

SEQ ID NO: 973 - protein, 273 aa, Lactobacillus plantarum; identical to SEQ ID NO: 780
  source 1..273: note = SBI04889_Tyrosine-protein phosphatase

SEQ ID NO: 974 - protein, 221 aa, Lactobacillus plantarum
  source 1..221: note = SBI04889_Sugar transferase
MHEVEINESIVADEQHCEFISKIGVPVTGWKMDLKRCFDLAVGLLGTLLSVPIVIVFAILIKLTSDGPVFYKQARVGWMGTTFDVIKLRSMYQDAEAQTGAIWAQKNDPRVTPVGRWMRKTRIDELPQFWNVLKGDMSLVGPRPERPELTEQFSERYPDFPKRLRIIPGITGYAQINGGYDITPGAKCQYDNYYIEHFSIWFDIKMLMGTVRVIISGDGAR

SEQ ID NO: 975 - protein, 331 aa, Lactobacillus plantarum
  source 1..331: note = SBI04889_UDP-glucose 4-epimerase
MSILVLGGAGYIGSHMVDRLVEHGTDVVVVDNLVTGHRAAVNSAAKFYQGDLRDADFLNHVFDTEDIEAVVHFAAFSIVPESMSKPLKYFDNNTGGMITLLETMQAHDVKQIVFSSTAATYGTPKQIPIKETDPQLPINPYGASKLMMEQIMHWADVAYGIKFVALRYFNVAGAKPDGSIGEDHGPETHLVPIILQVAQGKRDELKIFGDDYNTPDGTNVRDYVHVVDLADAHILALKYLAAGNDSNAFNLGSSTGFSNKQMLAAAREVTGQPIPAKLAPRRPGDPDSLVAASDKARDVLGWQPNYDNVNDIIETAWAWTQKHPNGYDDRD

SEQ ID NO: 976 - protein, 289 aa, Lactobacillus plantarum
  source 1..289: note = SBI04889_Glucose-1-phosphate thymidylyltransferase
MKGIILAGGSGTRLYPITRALSKQLIPIYDKPMIYYPLSTLMLAGIQDILVISTPQDTPRFEELLNDGHDLGLNISYAVQEQPNGLAEAFVIGADFIGEDSVCLILGDNIYYGGGLSKMLQHASEKEHGATVFGYHVTDPERFGVVDFDDNMHAKSIVEKPEHPASNYAVTGMYFYDNQVVEIAKNIKPSARGELEITDVNKVYLELNELDVELMGRGFAWLDTGTHDSLQEASSFIATVQKRQNLKVACLEEVAYRMGYIDADKVYELAQPLKKNDYGQYLLRLIGRA

SEQ ID NO: 977 - protein, 193 aa, Lactobacillus plantarum
  source 1..193: note = SBI04889_dTDP-4-dehydrorhamnose 3,5-epimerase
MGKLKVTTTKLQDVKIIEPAVFGDKRGFFTETYSDRDFKEAGINFDFIQDNQSLSAEAGVLRGLHFQRGKAAQTKLIRVVTGAVLDVIVDVRKGSPTYGEWEGYIISESNHRQLLVPRGFAHGFVTLTDNVNFLYKCDNYYNAEADGGITFMDKDLNINWPIDFDQAITSEKDAKQQTFAEFEKNNPFVYGEI

SEQ ID NO: 978 - protein, 281 aa, Lactobacillus plantarum
  source 1..281: note = SBI04889_dTDP-4-dehydrorhamnose reductase
MSKIMIVGAKGQLGQELQRLLTELKLDFDALDVTDLDITDKAAVAAKVAELKPEVILDAAAYTAVDKAEDEGKELNWHVNVDGTQSLAEVAAAAKVKLVYISTDYVFDGTNEGLYLEDSPANPKNEYGRAKWAGEEAVRNSGADYYIVRTSWVFGEFGHNFVFTMQNLAKTHDKLTVVDDQTGRPTWTRTLAEFMMHLLQVDAPFGTYQLSNDNSCTWYEFAKEILKDTDVEVAPVTSDQFPQKAYRPRHSVMSLDKAKSTGFNIPTWQEALAAFLTSLAK

SEQ ID NO: 979 - protein, 202 aa, Lactobacillus plantarum; identical to SEQ ID NO: 791
  source 1..202: note = SBI04889_Flavin prenyltransferase LpdB

SEQ ID NO: 980 - protein, 325 aa, Lactobacillus casei
  source 1..325: note = SBI04895_Phosphate acetyltransferase
MDLFESLKDKINGKNLRIVFPEGEDPRVLGAAVRLAADGLIQAIVLGNPDKIQTLAAAKSWDLSKLTVRDPANDDIHAKMVASFVERRKGKATPEQAEKIVQDANYFGTMLVYMKEADGMVSGAVHSTADTVRPALQIIKTRPGVHLVSGAFIMQRGRDERYLFADNAINIDPDADQLAEIAVESAKTAALFDIEPPRVALLSFSTKGSAKGPQVDKVVEATKKAHELAPDLALDGELQFDAAFVPSVAKQKAPDSKVAGEANVFIFPELQSGNIGYKIAQRFGGFEAIGPILQGLNQPVSDLSRGANEEDVYKLAIITAAQTLL

SEQ ID NO: 981 - protein, 245 aa, Lactobacillus casei; identical to SEQ ID NO: 960
  source 1..245: note = SBI04895_Lysozyme M1

SEQ ID NO: 982 - protein, 331 aa, Lactobacillus casei; identical to SEQ ID NO: 804
  source 1..331: note = SBI04895_UDP-glucose 4-epimerase

SEQ ID NO: 983 - protein, 374 aa, Lactobacillus casei
  source 1..374: note = SBI04895_UDP-galactopyranose mutase
MKLLVVGAGLFGATVARERALKGDLVDVIEKRDHLAGNIYTEDIEGIQVQRYGAHIFHTSNQKVWEYINQFATFNRYTNEVIANYKGEIYNLPFNMNTFNKMWGVITPKEAEAKIDEQRAAMAGKKPENLEEQAISLVGTDIYSKLIKDYTAKQWGREPKELPAFIIRRLPVRFTYDNNYFNDLYQGIPVGGYTQIVEKMLDVPNITVKLNTDFLENKQDYLNRYDKVIYTGMIDQFFDYQLGTLEYRSLRFDTEVLDTDNFQGNAVVNYTDSETPFTRIIEHKHFEFGKGNRGKTVITHEYPATWTKGDEPYYPVNNSENNHLFTQYRELATRETPRVAFGGRLGLYRYYNMDQVITAALQFLQGEFFDTESK

SEQ ID NO: 984 - protein, 211 aa, Lactobacillus casei
  source 1..211: note = SBI04895_N-acetylmuramoyl-L-alanine amidase
MAKRRRHFTLKIIPLAAWLVIGFFAIGVTLVVGSYWAQQQTEVTQKQEVADEKAAVRAKKVAFIKRLVPTAQVMQKQYGVLTSVTLAQAILESNWGTSALAKDYHNLFGIKGTDPATTKVLRTQEYVNDKWIMVDGRFRVYDNDSESIRDHALLFVNGTDWNPQQYATVRAAKDYKTAAAALKTDGYATDPDYPQKLIHLIETWNLTQYDS

SEQ ID NO: 985 - protein, 327 aa, Leuconostoc pseudomesenteroides
  source 1..327: note = SBI04900_Phosphate acetyltransferase
MELFEQLKNKISGQNKTIVFPEGEDVRIQGAAVRLAADGLLKPILLGDGKAIAATATANNFDLSGVEVIDPANYDESALAQLNAALVERRKGKTDADTAAKWLKDVNYFGTMLVYTGKADGMVSGATHPTGDTVRPALQIIKTAPGSSRISGAFIMQKGDERYVFSDAAINIDIDAPTMAEIAVQSAKTAKVFEIDPRVAMLSFSTKGSAKSPLVDKVAEATKLAKELAPEFADVIDGELQFDAAFVPTVGAAKAPDSKVAGHANTFIFPSLEAGNIGYKIAQRLGGYEAIGPILQGLAKPVSDLSRGANEEDVYKVAIITAAQALA

SEQ ID NO: 986 - protein, 414 aa, Leuconostoc pseudomesenteroides
  source 1..414: note = SBI04900_UDP-galactopyranose mutase
MANLWHENLVLVELVKSDMTKKYNTKNYDYLVVGAGPFGMIFAYEAAKRGKKSLIVEKRPYIGGNMHTHTEHGITVHDFGAHIFHTDNKEVWDYIRQFADFNGFQNQVVANYKGTLYNLPFNMNTFYQMWGTKTPDEAHAKIEEQKNAALKDLGDRQPRNLEEQAISLIGTDIYNKLIKGYTEKQWGRKATELPAFIIKRLPVRFIYDNNYFNHRYQGIPVGGYTQIFERMLEQSNGLVDVLTDTDFFDDKETLLSEFPRVLYTGMIDQFFDYKFGELEYRSLRFEHEVIDSDNYQGNSVINYTDAETSYTRVMEWKHFDGLADEGKTIITKEYPQDWDRSKEAYYPVNNDENTRIYKAYAKEARDNHPEIIFGGRLGKYRYFDMDQVFNDAFNTVRQEFDINQDFNFAHDEVK

SEQ ID NO: 987 - protein, 84 aa, Leuconostoc pseudomesenteroides
  source 1..84: note = SBI04900_dTDP-4-dehydrorhamnose reductase
MLHLIAVEATYGIYHLSNDETATWFDFEKEILKETAVEVEPVTSAAFRQKAYRPKHSVMNLEKAKSTGFEIPSWRKALQSFLMK

SEQ ID NO: 988 - protein, 290 aa, Leuconostoc pseudomesenteroides
  source 1..290: note = SBI04900_Glucose-1-phosphate thymidylyltransferase
MKGIILAGGSGTRLYPITKATSKQLVPIYDKPMIYYPLSVLMLAGITDILLISTPEYVGQFEELFGNGHDIGVKIDYAIQEEPRGLADAFIVGADFIGNDSVALVLGDNIFYGAGLSEKLQAAALKATGATVFGYQVKDPERFGVVDFDQAGKAISIVEKPAQPQSNYAVTGLYFYDNDVVEIAANVKPSARGEIEISDINQAYLERGDLDVQVMGRGYAWLDTGTHDSLLEASSFIATIQKQQNLRVASLEEIAYRMGYIDTAQLEKLAQPLKKNDYGQYLLRIVAEEG

SEQ ID NO: 989 - protein, 290 aa, Leuconostoc pseudomesenteroides
  source 1..290: note = SBI04900_Glucose-1-phosphate thymidylyltransferase
MKGIILAGGSGTRLYPITKATSKQLVPIYDKPMIYYPLSVLMLAGITDILLISTPEYVGQFEELFGNGHDIGLNIDYAIQEEPRGLADAFIVGADFIGNDSVALVLGDNIFYGAGLSEKLQAAALKATGATVFGYQVKDPERFGVVDFDQAGKAISIVEKPAQPQSNYAVTGLYFYDNDVVEIAANVKPSARGEIEISDINQAYLERGDLDVQVMGRGYAWLDTGTHDSLLEASSFIATIQKQQNLKVASLEEIAYRMGYIDIAQLEKLAQPLKKNDYGQYLLRIVAEEG

SEQ ID NO: 990 - protein, 277 aa, Leuconostoc pseudomesenteroides
  source 1..277: note = SBI04900_dTDP-4-dehydrorhamnose reductase
MKYLITGAHGQLGQELQKLLHERGLTFVAYDSKALDITNREAVMATFKAEQPDVVLHAAAYTKVDLAEDEGRAMNWQVNVAGTKNIADATKQYGAKLVAVSTDYVFDGLNVGEYRETDPVNPRNAYGRAKLAGELAVTESGAAAYIVRTSWVFGEFGNNFVYTMQRLAESHPKLTVVNDQLGRPTWTRTLAEFMLHLIAVEATYGIYHLSNDETATWFDFAKEILKDTAVEVEPVTSAAFPQKAYRPKHSVMNLEKAKSTGFEIPSWRKALQMFLKE

SEQ ID NO: 991 - protein, 277 aa, Leuconostoc pseudomesenteroides
  source 1..277: note = SBI04900_dTDP-4-dehydrorhamnose reductase
MKYLITGAHGQLGQELQKLLRECGLTFVAYDSKALDITNREAVMAIFKAEQPDVVLHAAAYTKVDLAEDEGRAMNWQVNVAGAKNIADATKQYGAKLVAVSTDYVFDGLNVGEYRETDPVNPRNAYGRAKLAGELAVTESGAAAYIVRTSWVFGEFGNNFVYTMQRLAESHPKLTVVNDQLGRPTWTRTLAEFILHLIAVEATYGIYHLSNDETATWFDFAKEILKDTAVEVEPVTSAAFPQKAYRPKHSVMNLEKAKSTGFEIPSWRKALNKFLCR

SEQ ID NO: 992 - protein, 399 aa, Pediococcus pentosaceus; identical to SEQ ID NO: 945
  source 1..399: note = SBI04902_Acetate kinase

SEQ ID NO: 993 - protein, 373 aa, Pediococcus pentosaceus; identical to SEQ ID NO: 946
  source 1..373: note = SBI04902_UDP-galactopyranose mutase

SEQ ID NO: 994 - protein, 330 aa, Pediococcus pentosaceus; identical to SEQ ID NO: 947
  source 1..330: note = SBI04902_UDP-glucose 4-epimerase

SEQ ID NO: 995 - protein, 334 aa, Pediococcus pentosaceus; identical to SEQ ID NO: 948
  source 1..334: note = SBI04902_UDP-glucose 4-epimerase

SEQ ID NO: 996 - protein, 324 aa, Pediococcus ethanolidurans
  source 1..324: note = SBI04910_Phosphate acetyltransferase
MDLFEGLKAKIKGQDRTVVFPEGEDVRIYSAASRLAQQGLVKPILLGKVTAIQEKAAKEDIDLAGIKIIDPDTYPETDKQAMVDALVERRKGKNTVEEVQKMLMDVNYFGTMLVYLHKADAMVSGAIHPTGDTVRPALQIIKTKPGVKRISGAFVMQRNHERYIFADTAINIDPDAATLAEIAVESAHTAEIFDIEPKVAMLSFSTKGSAKGDMVAKVQEATKLAQEKAPEVEIDGELQFDAAFVPDVGASKAPGSKVAGHATVFVFPELQSGNIGYKIAQRLGHFEAIGPILQGLNAPVSDLSRGASEEDVYKVAIMTAAQVR

SEQ ID NO: 997 - protein, 400 aa, Pediococcus ethanolidurans
  source 1..400: note = SBI04910_Acetate kinase
MEKTIAINAGSSSFKFKLFEMPSEKVLASGQVDRIGIDGSTFTIIYGDQQNIRIEKPVKNHEVAINIVLNALIDLKIIRSYDEITGVGHRVVAGGEIFKGSVLITEKVIKQIESLSEYAPLHNPANVLGIRAMQKVLPNVKSVAVFDTSFHETLPPKNYLYSIPYEYYEKYGARKYGAHGTSHQFVALDAAKLLGKPLSSLKMITLHLGAGSSIDAILNGQSYDTSMGFTPVSGITMATRSGDIDVSLVNYLMEKLKITDFSEMIKILNTKSGLLGISGISSDMRDVLEARHKSRRAELAVEIFVNNIVKYIGAYIAEMHGIDALVFTAGIGENGMLVRKMIVDELDYFGLKIDDERNQVQGELRDISASDSKAKVLVVPTNEELAIAREVERFKQENKD

SEQ ID NO: 998 - protein, 193 aa, Pediococcus ethanolidurans; identical to SEQ ID NO: 932
  source 1..193: note = SBI04910_N-acetylmuramoyl-L-alanine amidase

SEQ ID NO: 999 - protein, 331 aa, Pediococcus ethanolidurans; identical to SEQ ID NO: 931
  source 1..331: note = SBI04910_UDP-glucose 4-epimerase

SEQ ID NO: 1000 - protein, 185 aa, Pediococcus ethanolidurans
  source 1..185: note = SBI04910_Flavin prenyltransferase LpdB
MKKIIVGITGASGTVYAIDLLEKLHRLDDVEVHLVMSQWAKKNLELETDYSLSQINELADKVYHINDQGAAIASGSFLNDGMVIVPASMKTVATIAYGIGDNLIARAADVAIKEQRKLIIVPRETPLSVIHLENLTKLARVGAQIIPPMPAFYSHPKTIQDLVNHQTMKVLDAFGIPNEVDERWK

SEQ ID NO: 1001 - protein, 327 aa, Lactobacillus harbinensis
  source 1..327: note = SBI04913_Phosphate acetyltransferase
MDLFASLQQKIQGKDIRIVFPEGTEPRIIGAAARLNAERSVTPILLGEPAAIRAAAEKAGFTLGNIQILDPNDYADFDSLVTSFVDRRKGKNTKEQAETMLRDPNYFGTMLVYTGLADGMVSGAVHSTGETVRPALQIIKTKPGVSRTSGAFIMQRGRDAERYIFADCAINIDPNAQELAEIAVASAQTAKLFDIEPHVAMLSFSTKGSAKAPQVDKVAEATQIAHELTPDLDLDGELQFDAAFVPSVGEQKAPGSTVAGKATVFIFPDLQSGNIGYKIAQRFGHFEAIGPILQGLNKPVSDLSRGSNEEDVYKLAIITAAQTLDQD

SEQ ID NO: 1002 - protein, 371 aa, Lactobacillus harbinensis
  source 1..371: note = SBI04913_UDP-galactopyranose mutase
MKLLVVGSGLFGAVVARERALAGDQVTVIEKRDHIAGNIYTEDVAGIQVHRYGAHIFHTNSERVWQYVQQFATFNRFTNQVIANYHDRLFNLPFNMNTFHQMWGVTTPAEAQAKIAEQQQAGATRRPHNLEEQAIALVGTDIYETLIKEYTAKQWGRAPIDLPAFIIRRLPVRFTYDNNYFSDVHQGIPVGGYTQLVAKMLKLPTISVQLNTDFLTKKAAYLVDYDRIVYSGMIDAFFDYQFGALGYRSLRFATELLDTPNFQGNAVINYTDAETPYTRIIEHKHFEFGTGNRQQTVITREYPAIWTPGAEPYYPINDPENDALFQQYRQYAATAAPKVIFGGRLGAYRYYNMDQVIAAALQVARNEQLFK

SEQ ID NO: 1003 - protein, 331 aa, Lactobacillus harbinensis
  source 1..331: note = SBI04913_UDP-glucose 4-epimerase
MTVLVLGGAGYIGSHTVDRLVDKGYDVAVVDNLITGHEKAINAKARFYQGDVRDKLFMREVFDKENIDTVIHFAAFSIVPESMSDPLKYFDNNTYGMTALLEVMRDAGVKRIVFSSTAATYGEPKQVPIKETDPQIPTNPYGESKLAMEKIIHWADVAYGIKFVALRYFNVAGAKDDGSIGEDHHPETHLIPIILQVAKGQRDKLTIFGGDYPTKDGTNVRDYVHVMDLADAHILAMEYLKQGNDSTAFNLGSSHGFSNKEIVDAARKATGKPIPAEVGPRRPGDPATLVASSEKAKKILGWEPQYDDMEKIIATAWHWDQTHPNGYNDRR

SEQ ID NO: 1004 - protein, 326 aa, Lactococcus lactis
  source 1..326: note = SBI04916_Phosphate acetyltransferase
MELFESLKQKISGKGLKIVFPEGTDARILGAANRLNADGLITPVFIGNVKEVTETLISRGINPEGFEIYDPENCGRFETMTETFVERRKGKVTEEQAKELLKDPNYFGTMLVYMKIADGMVSGAIHSTADTVRPALQIIKTKPGVKSVSGAFIMVRGRDDNEKYIFGDCAINIKPDAPTLADIAVASAETAALFDIDPKVAMLSFSTKGSGKSEDVDKVVEATKLVKEDYPEIEIDGELQFDAAFVPAVARQKAPDSTVAGRANVFIFPDIQSGNIGYKIAQRLGNFEAIGPILQGLNAPVSDLSRGSNEEDVYKLAIITAAQALK

SEQ ID NO: 1005 - protein, 289 aa, Lactococcus lactis
  source 1..289: note = SBI04916_Glucose-1-phosphate thymidylyltransferase
MKGIILAGGSGTRLYPLTRAASKQLMPIYDKPMIYYPLSTLMLAGIKDILIISTPTDTPRFKELLQDGSEFGINLQYAVQPSPDGLAQAFIIGEEFIGDDSVALILGDNIYHGPGMSKMLQNAAAKEKGATVFGYHVPDPERFGVVEFDENMNAISIEEKPEEPKSNYAVTGLYFYDNDVIEIAKNIEPSSRGELEITDVNKAYLERGDLSVELMGRGFAWLDTGTHESLLEAAQYIETVQRMQNMQVANLEEIAYRMGYITADDVLKLAQPLKKNEYGQYLLRLIGKD

SEQ ID NO: 1006 - protein, 380 aa, Lactococcus lactis
  source 1..380: note = SBI04916_UDP-galactopyranose mutase
MKFNKKNYDYLIVGAGPYGSIFAHEAAKHGKKSLIIERRSHIGGNMYTHKEHGINVHDYGAHIFHTDNKMVWDYVNQFTEFNNYINQVVANYKGELYNLPFNMNTFYQMWGVKTPEEAAAKIEEQKAKAGVSGIPKNLEEQAISLIGTDIYHKLIKGYTEKQWGRKATELPSFIIRRLPVRYTFDNNYFNHRYQGVPVDGYTAIFDKMLDSDLIDVQTGVDFFSDKEVFLEEFPKIVYTGMIDQFFDYSFGELEYRSVRFETETVKSDNIQGNAVINYTDAETPYTRVMEWRHFDKKADEGYTILTKEYPQNWDRTKEAYYPVNDEKNSKLFRKYKEETKKYPNVIFGGRLGNYQYYDMDQVFGVALKAVEKEFKDLDKN

SEQ ID NO: 1007 - protein, 376 aa, Lactococcus lactis
  source 1..376: note = SBI04916_UDP-galactopyranose mutase
MKFNNKNYDYLIVGAGPYGSVFAYEAAKRGKRSLIIERRATIGGNMATHKEHGINIHDFGAHIFHTDNKEVWEYINQFTEFNGYINQVVADYKGERYNLPFNMNTFYQMWGVKTPEEAQAKIDEQRDIGNVSGAPKNLEEQAISLIGKDIYLKLIKGYTEKQWGRNAVDLPSFIIRRLPVRFTYDNNYFNHRYQGVPVDGYTSIFEKMYETDLIDLQLETDFFEHKDEYLNEFSKIIYTGMIDQFFDYKFGELEYRSVRFESETFKSNNQQGSAVINYTDSETPFTRIMEWKHFDKKGDDGYTILTKEYPQDWDRTREAYYPVNDKKNTDLFKKYKKEAIKFGNVIFGGRLGNYQYYDMDQVIGSALKAVKKEFRE

SEQ ID NO: 1008 - protein, 326 aa, Lactococcus lactis; identical to SEQ ID NO: 1004
  source 1..326: note = SBI04918_Phosphate acetyltransferase

SEQ ID NO: 1009 - protein, 289 aa, Lactococcus lactis
  source 1..289: note = SBI04918_Glucose-1-phosphate thymidylyltransferase
MKGIILAGGSGTRLYPLTRAASKQLMPIYDKPMIYYPLSTLMLAGIKDILIISTPTDTPRFKELLQDGSEFGINLQYAVQPSPDGLAQAFIIGEEFIGDDSVALILGDNIYHGPGMSKMLQNAAAKENGATVFGYHVPDPERFGVVEFDENMNAVSIEEKPEEPKSNYAVTGLYFYDNDVIEIAKNIEPSPRGELEITDVNKAYLERGDLSVELMGRGFAWLDTGTHESLLEAAQYIETVQRMQNMQVANLEEIAYRMGYITADDVLKLAQPLKKNEYGQYLLRLIGKD

SEQ ID NO: 1010 - protein, 324 aa, Pediococcus parvulus
  source 1..324: note = SBI04919_Phosphate acetyltransferase
MDLFDGLKAKIKGQNRTVVFPEGDDVRIYSAAARLAQDGLVKPILLGDAKKIVEKASKDDVDLKNVEIINPDNYSEEEKQKMVDALVERRKGKNTIEEVLKMLTDVNYFGTMLVYLHKADAMVSGAVHPTGDTVRPALQIIKTKPGVKRISGAFVMQRNNERYIFADTAINIDPDAATLAEIAVESAHTAEIFDIEPKVAMLSFSTKGSAKGDMVTKVQEATKLAQEKEPEMEIDGELQFDAAFVPDVGASKAPDSKVAGHATVFVFPELQSGNIGYKIAQRLGHFEAIGPILQGLNAPVSDLSRGASEEDVYKVAIMTAAQVR

SEQ ID NO: 1011 - protein, 400 aa, Pediococcus parvulus
  source 1..400: note = SBI04919_Acetate kinase
MEKTIAINAGSSSLKFKLFEMPSEKVLASGQLDRIGIDGSTFTMIYGDQENTRFEEPVKDHEVAIHMVLKALIDLKIIRSFDEITGVGHRVVAGGEIFNGSVEITEKVIKQIESLSEYAPLHNPANVIGIRAVQKVLPNVTSVAVFDTSFHETLPAKNYLYSIPYEYYEKYGARKYGAHGTSHQLVALDAAKLLGKPLSSLKMITLHLGAGSSIDAILNGQSYDTSMGFTPVSGITMATRSGDIDVSLVNYLMEKLKITDFSEMIEILNTKSGLLGISGISSDMRDVLEARHKSRRAELAVEIFVNNIVKYIGAYIAEMHGIDVLVFTAGIGENGMLVRKMIVDELDYFGLKIDNEKNQVQGELRDISASDSKAKVLVVPTNEELAIAREVERFKKETKA

SEQ ID NO: 1012 - protein, 371 aa, Pediococcus parvulus
  source 1..371: note = SBI04919_UDP-galactopyranose mutase
MNYLVIGSGLFGSTFAYEAAKRGAQVKVIEKRDHIAGNIYTKEVEGIQVHEYGAHIFHTKMPKIWEYINKFADFNNYINTPIANYNGEIYNMPFNMNTFNKLWGVVTPEEAEKKIEDQKQSVKLNGKPQNLEEQAISLVGPDVYKKLVKGYTEKQWGQSATELPAFIIRRLPVRFTYNNNYFDDPYQGIPIGGYTQIIEKMLASDLVEVETNTDFFDKKEEYLKSDTKIIYTGMIDQFFDYELGELEYRSLEFETEVKDVDNYQGNAVVNYTDAETPYTRVIEHKHFEFGKGNKNKTVITHEYPKAWHRGDEPYYPINNKRNKELYTRYVELARKKAPNVVFGGRLGQYRYYNMDQTIMAALQTVKKEFGE

SEQ ID NO: 1013 - protein, 331 aa, Pediococcus parvulus
  source 1..331: note = SBI04919_UDP-glucose 4-epimerase
MSVLVLGGAGYIGSHMVKRLIEQNEDVIVIDNLVTGHQQAVSKQARFYKGDVRDRAFLDQVFQKESIDTVIHFAAFSIVPESMKDPLKYFDNNTGGVITLLEAMHANHVSRIVFSSTAATYGNPENAMIKETDVQAPINPYGESKLMMEKIMHWADVAYGIKFVALRYFNVAGAAADGSIGEDHHPETHLIPIVLQVASGKRAELQIFGDDYETLDGTNVRDYVHVTDLADAHILAMKYLQAGNESNAFNLGSSTGFSVKQILEAARQATGKEIPAKIAARRPGDPDTLVAKSDKAREVLKWQPQYDDIHEIIKTAWNWTQKHPNGFEDEN

SEQ ID NO: 1014 - protein, 179 aa, Pediococcus parvulus
  source 1..179: note = SBI04919_Flavin prenyltransferase LpdB
MKKIIVGVTGASGTIYAINLLEKLHRLDNVEVHLVMSQWAKKNLELETDYSLSQINALADKVYHSNDQGAAIASGSFLNDGMVIVPATIAYGIGDNLIARAADVAIKEQRKLIIVPRETPLSVIHLENLTKLAKVGAQIIPPVPAFYNHPKTIQDLVNHQTMKILDAFGIPNEVDERWS

SEQ ID NO: 1015 - protein, 603 aa, Lactobacillus  plantarum
  source 1..603: note = SBI05399_Pyruvate oxidase
MVMKQTKQTNILAGAAVIKVLEAWGVDHLYGIPGGSINSIMDALSAERDRIHYIQVRHEEVGAMAAAADAKLTGKIGVCFGSAGPGGTHLMNGLYDAREDHVPVLALIGQFGTTGMNMDTFQEMNENPIYADVADYNVTAVNAATLPHVIDEAIRRAYAHQGVAVVQIPVDLPWQQIPAEDWYASANSYQTPLLPEPDVQAVTRLTQTLLAAERPLIYYGIGARKAGKELEQLSKTLKIPLMSTYPAKGIVADRYPAYLGSANRVAQKPANEALAQADVVLFVGNNYPFAEVSKAFKNTRYFLQIDIDPAKLGKRHKTDIAVLADAQKTLAAILAQVSERESTPWWQANLANVKNWRAYLASLEDKQEGPLQAYQVLRAVNKIAEPDAIYSIDVGDINLNANRHLKLTPSNRHITSNLFATMGVGIPGAIAAKLNYPERQVFNLAGDGGASMTMQDLATQVQYHLPVINVVFTNCQYGFIKDEQEDTNQNDFIGVEFNDIDFSKIADGVHMQAFRVNKIEQLPDVFEQAKAIAQHEPVLIDAVITGDRPLPAEKLRLDSAMSSAADIEAFKQRYEAQDLQPLSTYLKQFGLDDLQHQIGQGGF

SEQ ID NO: 1016 - protein, 397 aa, Lactobacillus  plantarum; identical to SEQ ID NO: 776
  source 1..397: note = SBI05399_Acetate kinase

SEQ ID NO: 1017 - protein, 325 aa, Lactobacillus  plantarum
  source 1..325: note = SBI05399_Phosphate acetyltransferase
MDLFESLAQKITGKDQTIVFPEGTEPRIVGAAARLAADGLVKPIVLGATDKVQAVANDLNADLTGVQVLDPATYPAEDKQAMLDALVERRKGKNTPEQAAKMLEDENYFGTMLVYMGKADGMVSGAIHPTGDTVRPALQIIKTKPGSHRISGAFIMQKGEERYVFADCAINIDPDADTLAEIATQSAATAKVFDIDPKVAMISFSTKGSAKGEMVTKVQEATAKAQAAEPELAIDGELQFDAAFVEKVGLQKAPGSKVAGHANVFVFPELQSGNIGYKIAQRFGHFEAVGPVLQGLNKPVSDLSRGCSEEDVYKVAIITAAQGLA

SEQ ID NO: 1018 - protein, 280 aa, Lactobacillus  plantarum
  source 1..280: note = SBI05399_dTDP-4-dehydrorhamnose reductase
MAKVMIVGANGQLGHELQRLLNEQEIAFDALTEKELDITDLDAVKAKIAELQPAVLYDCAAYTAVDKAEDEGKALNWLVNVDGTKNLAQVAAEQGVKLVYVSTDYIFDGTNKGEYLEDDPANPKNEYGRAKWAGEEAVRHSGADYYIVRTSWVFGEFGHNFVFTMQNLAKTHDKLTVVNDQLGRPTWTRTLAEFMAHLVKTEAASGTYQLSNDNTATWYDFAKEILKDTDVEIAPVTSEQFPQKAYRPQHSVMNLDKAKATGYKILTWQDALSEFLESLE

SEQ ID NO: 1019 - protein, 193 aa, Lactobacillus  plantarum
  source 1..193: note = SBI05399_dTDP-4-dehydrorhamnose 3,5-epimerase
MGKLKVTTTKLQDVKIIEPAVFGDKRGFFTETYSDRDFKEAGIDFDFIQDNQSLSAEAGVLRGLHFQRGKAAQTKLIRVVTGAVLDVIVDVRAGSPTYGEWEGYIISESNHRQLLVPRGFAHGFVTLTDNVNFLYKCDNYYNAEADGGITFMDKDLNINWPIDYDQAITSDKDAKQQTFKEFEQNNPFVYGEI

SEQ ID NO: 1020 - protein, 289 aa, Lactobacillus  plantarum
  source 1..289: note = SBI05399_Glucose-1-phosphate thymidylyltransferase
MKGIILAGGSGTRLYPITRAISKQLIPIYDKPMIYYPLSTLMLAGIQDILVISTPVDTPRFKELLGDGHDLGLNLTYAVQERPNGLAEAFIIGADFIGDDSVCLILGDNIYYGGGLSKMLQHASAKPKGATVFGYHVNDPERFGVVDFDENMHAKSIVEKPDHPASNYAVTGMYFYDNQVVDIAKNIQPSPRGELEITDINKVYLEHNELDVELMGRGFAWLDTGTHDSLQEASSFIATVQKRQNLKVACLEEVAYRMGYIDADKVYELAQPLKKNDYGQYLLRLIGRA

SEQ ID NO: 1021 - protein, 334 aa, Lactobacillus  plantarum
  source 1..334: note = SBI05399_UDP-glucose 4-epimerase
MAVLVLGGAGYIGSHAVDRLVAKGYDVAVVDNLVTGHRAAVNEHARFYEGDVRDTVFMNTVFDQENVEGVIHFAAFSVVPESMKDPLKYFDNNTAGMIKLLEVMAKHDVKKIVFSSTAATYGEPKQVPIKESDPQVPTNPYGESKLAMEKIMHWSDVAYGIKFVALRYFNVAGAKPDGSIGEDHAPETHLVPIILQVAAGERDQLQIFGDDYPTPDGTNVRDYVHVVDLADAHILALEYLKQGHDSDAFNLGSSTGFSNKQMLDAAREVTGKPIPAIMAPRRAGDPSTLVAASDKARTVLGWTPQYDDVKEIIKTAWTWKESHPAGYDDRGGQA

SEQ ID NO: 1022 - protein, 221 aa, Lactobacillus  plantarum
  source 1..221: note = SBI05399_Sugar transferase
MHEVEINESIVADEQHCEFISKIGVPVTGWKMDLKRCFDLAVGLLGTLLSVPIVIVFAILIKLTSDGPVFYKQERVGWMGTTFDVIKLRSMYQDAEAQTGAIWAQKNDPRVTPVGRWMRKTRIDELPQFWNVLKGDMSLVGPRPERPELTEQFSERYPDFPKRLRIIPGITGYAQINGGYDITPGAKCQYDNYYIEHFSIWFDIKMLMGTVRVIISGDGAR

SEQ ID NO: 1023 - protein, 253 aa, Lactobacillus  plantarum
  source 1..253: note = SBI05399_Tyrosine-protein phosphatase
MTWTLKLTVMGTAIMGLRPTEYIDLHCHLLPGLDDGPQQLAQAVEMARQAVADGIHYVLATPHHLDRRYQNTGLVVERAVAELQAELKRQQIPLTVFAGQEVHLRDDLATALPHLLGIDVGRRYLLLELPHEQVPNYVAQVIFELLQQGTTPVIAHPERNAQIMAQPERLYDLVQQGYLAQLTAGSLVGQFGRAVKSTALELVECGLVQVIASDAHLMARRGFMMRAGYQALARLDSTKTRGFARRTRVTVCY

SEQ ID NO: 1024 - protein, 235 aa, Lactobacillus  plantarum; identical to SEQ ID NO: 781
  source 1..235: note = SBI05399_exopolysaccharide biosynthesis protein

SEQ ID NO: 1025 - protein, 252 aa, Lactobacillus  plantarum
  source 1..252: note = SBI05399_exopolysaccharide biosynthesis protein
MEQVITFDFIVKLIRQYWKVLLSLMILGGTIATVVTLWGIQPEYQANVQILVNRKHSSAGADLTGQQADVQMITTYKELITKPVVLKPARQTLMAETDIRRSLESLKQTVSVTSTANSQVFSIGVRDKNAKASAMIANQIAATFKDQVQHIIKVNNVTIVAPAETPDQPVAPKKIINILIGFVGGLILGLVYASVRILSNRRVQTLEYLADELMLTSLGIINHQQPVTATHDQPAIKPQPVTSVVKAAVKRV

SEQ ID NO: 1026 - protein, 331 aa, Lactobacillus  plantarum
  source 1..331: note = SBI05399_UDP-glucose 4-epimerase
MSILVLGGAGYIGSHMVDRLVEHGTDVVVVDNLVTGHRAAVNSAAKLYQGDLRDADFLNHVFDTEDIEAVVHFAAFSIVPESMSKPLKYFDNNTGGMITLLETMQAHDVKQIVFSSTAATYGTPKQIPIKETDPQLPINPYGASKLMMEQIMHWADVAYGIKFVALRYFNVAGAKPDGSIGEDHGPETHLVPIILQVAQGKRDELKIFGDDYNTPDGTNVRDYVHVVDLADAHILALKYLAAGNDSNAFNLGSSTGFSNKQMLAAAREVTGQPIPAKLAPRRPGDPDSLVAASDKARDVLGWQPNYDNVNDIIETAWAWTQKHPNGYDDRD

SEQ ID NO: 1027 - protein, 500 aa, Lactobacillus  plantarum
  source 1..500: note = SBI05399_Poly(Glycerol-phosphate) alpha-glucosyltransferase
MFYFINEYILGKNSSVEHAAINRVKLFNHYKAPARIVTKMYDRLLHQTMGTFQLANQQVLNMFDYFQQTTDVPTMHTDDMHLPVEYAVEVGANFSKIFNGDEHVSNVGFIPGTIGRVFYQEFFDNQGNLSSTDLWDWRGFKSSTQYFGQNGKLVLERFYNLQGETVIEQYYVPDTNGNPLASRLILKNYRDQAERFFQDANHLFRFFLAELSHLDKQTTTFISDRPGTSVKPLLELQDDSHKYVTVPIYQAKDINDPIHSPLDGLLTPAFDNLQHFDGFITATESQAQHLRTRFPKAKVTVLPTVTTSPLAQSKLQPITARPKQLLYVGRLAPDRQLDQLIRTIALVKQQVKEIQCDFYGYGDPEYLKTLNKLVEELKLTNNVHLLDYHPDLETRYDDYQLLLNTDIVDGGPMSMPEAMSHGIPVISYRFNYGPKDWIDDGHDGFIVDPGNQLALRDRVIELMTDTKKLTAFSEAAFKKLHTSQTDLKVWHRWQQLLGIK

SEQ ID NO: 1028 - protein, 331 aa, Lactobacillus  plantarum
  source 1..331: note = SBI05399_Glycosyltransferase
MQNPRLTIIVPCYNEEAVLPKSAHILDGILTDLIQHKQVNAASKLLFVDDGSQDKTWKLIKSLEKQYSTVTGLKFSRNFGHQNALMAGMQVASPTAEIVITIDADLQDDPQVIPEMVARYRAGSDIVLGVRNDRSSDSLFKRWTADGFYRLMKRIGVQLVPNHADFRLLSQRAVQALLTYEETNLFLRGIVPRLGFPTTKLYYHRQPRFAGVSKYPLRKMVAFAFDGITSFSIAPIKVILLFGMVISGGSLMMMLYALIQGLLGTATSGWSSLMTSLWFLGGMQLIGISIVGEYVGKIFAEVKHRPRYIIETDDYTATQQPAIVNSQRVHG

SEQ ID NO: 1029 - protein, 256 aa, Lactobacillus  plantarum
  source 1..256: note = SBI05399_exopolysaccharide biosynthesis protein
MMDQAVSFDFFIRLVRKYWRAIVSFTVVGLIVASGLTFFVITPKYQSSVQILVNRKNTNAATEYAGQQADVQMITTYKELIAGQVVLKPAKQQLSKRYGIERSLNTLKSEVSVTSTTNSQVFSIAVTDANAKASAEIANQIARSFKNQVQKIIKVNNVTIVAPAETPSGAVSPKKPLNMLIGLVVGLLLGFVYAAIRMLTDRRVHDADFLTDELGLTSLGLVNHQHHHSMKKQALNLNGGYHTHNDRTSSQAMKRV

SEQ ID NO: 1030 - protein, 242 aa, Lactobacillus  plantarum
  source 1..242: note = SBI05399_exopolysaccharide biosynthesis protein
MFKRKEQNITTTAPINLTTINEPMSVITEQIKTIRTNINFAATDHKLRTLMVTSAMFGEGKSTVSGNLAVEYAKEGMQVLLVDADLRRPTIHKTFGIKNHKGLSSWLANQMDDVNDAIHPVIGNLFVMTSGPKPPNPAELLGSNKMTEFLTSATRKLDLVIVDAPPILPVTDSQLLANKVDGTVLVVRQGVAQKAAVRDAVNSLKKSQANILGTVLNDVRDGSHHGYYGYNSGYGYYSDEDK

SEQ ID NO: 1031 - protein, 225 aa, Lactobacillus  plantarum
  source 1..225: note = SBI05399_Sugar transferase
MKQVEINETVKVGHVQPQTDYRFPTMIGKPVMGWKLFVKRIFDLTVGLIGTVLSSPIVLVFAILVKLTSKGPAFYKQERVGLMGKSFNVIKLRSMYQDAEARTGAVWAQKNDPRITPIGRFMRKTRVDELPQFWNVLKGDMSLVGPRPERPVLTEEFSRQFSDFPKRLRIIPGITGYAQINGGYDITPDEKCKLDNYYIEHFSVWFDIKMLVGTVKIIFTGDGAR

SEQ ID NO: 1032 - protein, 377 aa, Lactobacillus  plantarum
  source 1..377: note = SBI05399_UDP-galactopyranose mutase
MNEQYDYLVVGAGLFGAVFAHEAALRGKRVKVIEKRAHIAGNVYTKEVAGIQVHQYGAHIFHTSDREIWDYVNQFAEFNRYTNSPVANYKGHMYNLPFNMNTFSELWGVRTPAEAAAKIAEQRAAANLGNQQPRNLEEQAIALIGTDIYEKLIKGYTEKQWGQKATDLPAFIIRRLPVRYTYDNNYFNDTYQGIPIGGYTQIVEKMLANPEITVETNTDFFAHKAEYLAQYPKIVFTGMIDQFFDYQLGELAYRSLRFETETLPVDNYQGNAVVNYTDAETPYTRIIEHKHFEFGKGDADQTVITREFPANWQRGDEPYYPVNNQTNNTLYKQYAKLAAAEPQVIFGGRLGQYRYYDMHQVIHAALVTVASEFATTK

SEQ ID NO: 1033 - protein, 187 aa, Lactobacillus  plantarum
  source 1..187: note = SBI05399_Flavin prenyltransferase LpdB
MKRIVVGITGASGTIYAVDLLEKLHQRPDVEVHLVMSAWAKKNLELETDYSLAQLTALADATYRANDQGAAIASGSFLNDGMVIVPASMKTVAGIAYGFGDNLISRAADVTIKEQRKLVIVPRETPLSVIHLENLTKLAKLGAQIIPPIPAFYNHPQSIQDLVNHQTMKILDAFHIHNETDRRWEGD

SEQ ID NO: 1034 - protein, 327 aa, Streptococcus thermophilus
  source 1..327: note = SBI05579_Phosphate acetyltransferase
MRSLFGELREHISGKGVRIVFPEGNDDRVVRAAARLKFEELVDPIILGDPTEVHKILNDLGFVDFNCTIINPETYEGFEEMKEKFVEVRKGKATIEDADKLLRDVNYFGVMLVKLGLADGMVSGAIHSTADTVRPALQIIKTKPGISCTSGVFLMNREDTNHRLMFADCAINIEPNSQELAEIAINTAETAKVFGIDPKVAMLSFSTKGSAKSPKVDRVVQATNIAKEMRPDLAIDGELQFDAAFVPATAAIKAPDSDVAGQANVFVFPCLQAGNIGYKIAQRLGMFEAIGPILQGLNKPVNDLSRGASAEDIYNLAIITAAQALNN

SEQ ID NO: 1035 - protein, 289 aa, Streptococcus thermophilus
  source 1..289: note = SBI05579_Glucose-1-phosphate thymidylyltransferase
MKGIILAGGSGTRLYPLTRAASKQLMPIYDKPMIYYPLSTLMLAGIKEILIISTSQDLPRFEELLGDGSEFGISLSYAVQPSPDGLAQAFIIGKDFIGDDSVALVLGDNIFHGNGLSVMLQRAEAKEKGATVFGYQVKDPERFGVVEFDDDMNAISIEEKPEHPKSNFAVTGLYFYDNDVVEIAKNIKPSPRGELEITDVNKAYLDRGDLSVELMGRGFAWLDTGTHESLLQAAQYIETVQRLQNVQVANLEEIAYRMGYITKEKVLELAQPFKKNEYGQYLLRLIGEA

SEQ ID NO: 1036 - protein, 318 aa, Streptococcus thermophilus
  source 1..318: note = SBI05579_UDP-glucose 4-epimerase
MVDRLVEAGQEKVVVVDNLVTGHRAAVHPDAVFYEGDLADQDFMRKVFKENPDVDAVIHFAAYSLVAEFMEKPLKYFDNNTSGMVKLLEVMNECGVKYIVFSSTAATYGIPEEIPILETTPQNPINPYGESKLMMETIMKWSDQAYGIKYVPLRYFNVAGVKPDGSIGEDRGPETHLLPIILQVAQGVREKIIIFGDDYNTPDGTNVRDYVHPFDLTDAHLLAVEYLRKGNESTAFNLGSSTGFSNLQILEAARKVTGKEIPAEKAGRRPGDPDTLIASSEKARTVLGWKPQFDNVEKIIESAWVWHSSHPKGYDDRD

SEQ ID NO: 1037 - protein, 333 aa, Streptococcus thermophilus
  source 1..333: note = SBI05579_UDP-glucose 4-epimerase
MAILVLGGAGYIGSHMVDRLVEKGQEKVVVVDSLVTGHRAAVHPDAIFYQGDLSDQDFMRKVFKENPDVDAVIHFAAYSLVGESMEKPLKYFDNNTAGMVKLLEVMNECGVKYIVFSSTAATYGIPEEIPILETTPQNPINPYGESKLMMETIMKWSDQAYGIKYVPLRYFNVAGAKPDGSIGEDHGPETHLLPIILQVAQGVREKIMIFGDDYNTPDGTNVRDYVHPFDLADAHLLAVEYLRKGNESTAFNLGSSTGFSNLQILEAARKVTGKEIPAEKADRRPGDPDILIASSEKARTVLGWKPQFDNIEKIIASAWAWHSSHPKGYDDRG

SEQ ID NO: 1038 - protein, 366 aa, Streptococcus thermophilus
  source 1..366: note = SBI05579_UDP-galactopyranose mutase
MYDYLIVGAGLSGAIFAHEATKRGKKVKVIDKRDHIGGNIYCEDVEGINVHKYGAHIFHTSNKKVWDYVNQFAEFNNYINSPIANYKGSLYNLPFNMNTFYAMWGTKTPQEVKDKIAEQTADMKDVEPKNLEEQAIKLIGPDIYEKLIKGYTEKQWGRSATDLPPFIIKRLPVRLTFDNNYFNDRYQGIPIGGYNVIIENMLGDVEVELGVDFFANREELEASAEKVVFTGMIDQYFDYKHGELEYRSLRFEHEVLDEENHQGNAVVNYTEREIPYTRIIEHKHFEYGTQPKTVITREYPADWKRGDEPYYPINDEKNNAMFAKYQEEAEKNDKVIFCGRLADYKYYDMHVVIERALEVVEKEFTI

SEQ ID NO: 1039 - protein, 603 aa, Lactobacillus plantarum; identical to SEQ ID NO: 1015
  source 1..603: note = SBI05697_Pyruvate oxidase

SEQ ID NO: 1040 - protein, 325 aa, Lactobacillus plantarum; identical to SEQ ID NO: 775
  source 1..325: note = SBI05697_Phosphate acetyltransferase

SEQ ID NO: 1041 - protein, 397 aa, Lactobacillus plantarum
  source 1..397: note = SBI05697_Acetate kinase
MGKTIAINAGSSTLKFKLFEMPQERVIAQGAVERIGFKTSPVNIRYGVDHHYQEKAVVADHLAAVNIVLDELIKLRIIDSYDEITGVGHRVVAGGEQFHDSVLITDQVLKQITDLAEYAPLHNPANAVGIRAFKRVLPHVPAVAVFDTAFHASMPAVNYLYSLPYDYYQRYGARKFGAHGTSHRYVAVRAAKLLGRPLETLKLITLHLGAGSSITAIDHGQSLDTSMGFTPLAGITMATRSGDVDPSLVAYLMKKLNISDPDEMLTILNTQSGLLGLAGSADMQELEARYDEDSQAQLAIDIFVNWIVKYVGAYLAELQGADALVITAGIGERDARMRQRIADRLTYFGVAIDPTKNQVSGVERDLSTTDAKIRTLLIPTDEELMIARDVERVAQNQ

SEQ ID NO: 1042 - protein, 334 aa, Lactobacillus plantarum; identical to SEQ ID NO: 784
  source 1..334: note = SBI05697_UDP-glucose 4-epimerase

SEQ ID NO: 1043 - protein, 377 aa, Lactobacillus plantarum
  source 1..377: note = SBI05697_UDP-galactopyranose mutase
MNEQYDYLVVGAGLFGAVFAHEAALRGKRVKVIEKRDHIAGNIYTKEVAGIQVHQYGAHIFHTSDREIWDYVNQFAEFNRYTNSPVANYKGHMYNLPFNMNTFSELWGVRTPAEAAAKIAEQRAAANLGDHQPRNLEEQAIALIGTDIYKKLIKGYTEKQWGQKATDLPAFIIRRLPVRYTYDNNYFNDTYQGIPIGGYTQIVEKMLAHPEITVETNTDFFAHKAEYLAQYPKVVFTGMIDQFFDYQLGELAYRSLRFETETVPVDNYQGNAVVNYTDAETPYTRVIEHKHFEFGKGDADQTVITREFPANWQRGDEPYYPVNNQTNNTLYKQYAKLAAAEPQVIFGGRLGQYRYYDMHQVIHAALVTVASEFATTK

SEQ ID NO: 1044 - protein, 242 aa, Lactobacillus plantarum
  source 1..242: note = SBI05697_exopolysaccharide biosynthesis protein
MFKRKEKNITTTAPINLTTINEPMSVITEQIKTIRTNINFAATGHKLRTLMVTSAMLREGKSTVSGNLAVEYAKEGMQVLLVDADLRRPTIHKTFGLKNHKGLSSWLANQMDDVNDAIHPVIGNLFVMTSGPKPPNPAELLGSNKMTEFLTSATRKLDLVIVDAPPILPVTDSQLLANKVDGTVLVVRQGIAQKAAVRDAVNSLKKSQANILGTVLNDVRDGSHHGYYGYNSGYGYYSDEDK

SEQ ID NO: 1045 - protein, 256 aa, Lactobacillus plantarum
  source 1..256: note = SBI05697_exopolysaccharide biosynthesis protein
MMDQAVSFDFFIRLVRKYWRAIVSFTVVGLIVAAGLTFFVITPKYQSSVQILVNRKNTNAATEYAGQQADVQMITTYKELIAGQVVLKPAKQQLSKRYGIERSLNTLKSEVSVTSTTNSQVFSIAVTDANAKASATIANQIARSFKNQVQKIIKVNNVTIVAPAETPSGAVSPKKPLNMLIGLVVGLLLGFVYAAIRMLTDRRVHDADFLTDELGLTSLGLVNHQHHHSMKKQALNLNGGYHTHNDRTSSQAMKRV

SEQ ID NO: 1046 - protein, 280 aa, Lactobacillus plantarum
  source 1..280: note = SBI05697_dTDP-4-dehydrorhamnose reductase
MAKVMIVGANGQLGHELQRLLNEQEIAFDALTEKELDITDLDAVKAKIAELQPAVLYDCAAYTAVDKAEDEGKALNWLVNVDGTKNLAQVAAEQGVKLVYVSTDYIFDGTNKGEYLEDDPANPKNEYGRAKWAGEEAVRHSGADYYIVRTSWVFGEFGHNFVFTMQNLAKTHDKLTVVNDQLGRPTWTRTLAEFMAHLVKTEAASGTYQLSNDNTATWYDFAKEILKDTDVEVAPVTSEQFPQKAYRPQHSVMNLDKAKATGYHILTWQEALSEFLESLE

SEQ ID NO: 1047 - protein, 193 aa, Lactobacillus plantarum
  source 1..193: note = SBI05697_dTDP-4-dehydrorhamnose 3,5-epimerase
MGKLKVTTTKLQDVKIIEPAVFGDKRGFFTETYSDRDFKEAGIDFDFIQDNQSLSAEAGVLRGLHFQRGKAAQTKLIRVVTGAVLDVIVDVRAGSPTYGKWGGYIISESNHRQLLVPRGFAHGFVTLTDNVNFLYKCDNYYNAEADGGITFMDKDLNINWPIDYDQAITSDKDAKQQTFKEFEQNNPFVYGEI

SEQ ID NO: 1048 - protein, 289 aa, Lactobacillus plantarum; identical to SEQ ID NO: 1020
  source 1..289: note = SBI05697_Glucose-1-phosphate thymidylyltransferase

SEQ ID NO: 1049 - protein, 252 aa, Lactobacillus plantarum; identical to SEQ ID NO: 782
  source 1..252: note = SBI05697_exopolysaccharide biosynthesis protein

SEQ ID NO: 1050 - protein, 235 aa, Lactobacillus plantarum
  source 1..235: note = SBI05697_exopolysaccharide biosynthesis protein
MKLRRRVANMHTGIQLTTLTAPMSVVTEQVKTIRTNLNYAMVGKPLKTLMITSAIQGEGKSTVGSNLAVEYAKKGLQVLLVDADLRRPTIHQTFAISNQRGVSSWLSGQLTDVNEAIYPVLDHLFVMPSGPKPPNPAELLASDRMTKFLTVATRKLDLVIVDAPPILPVTDARILAGQVDGTVLVVRQNFVEKVAVRQAVSALKNARAQLLGTILNDVDIKTHGYGYGYYGTETN

SEQ ID NO: 1051 - protein, 273 aa, Lactobacillus plantarum
  source 1..273: note = SBI05697_Tyrosine-protein phosphatase
MTWTLKLTVMGTAIMGLRPTEYIDLHCHLLPGLDDGPQQLAQAVEMARQAVADGIHYVLATPHHLDRRYQNTGLVVERAVAELQAELKRQQIPLTVFAGQEVHLRDDLATALPHLLGIDVGRRYLLLELPHEQVPNYVAQVIFELLQQGTTPVIAHPERNAQIMAQPERLYDLVQQGCLAQLTAGSLVGQFGRAVKSTSLELVECGLVQVIASDAHLMARRGFMMRAGYQALARLDEHNPAYFATNARLLLNGDPVALGEVLRPKQRRKFWLF

SEQ ID NO: 1052 - protein, 221 aa, Lactobacillus plantarum; identical to SEQ ID NO: 1022
  source 1..221: note = SBI05697_Sugar transferase

SEQ ID NO: 1053 - protein, 502 aa, Lactobacillus plantarum
  source 1..502: note = SBI05697_Poly(Glycerol-phosphate) alpha-glucosyltransferase
MFYFINEYILGKNSSVEHAAINRVKLFNHYKAPAQIVTKMYDRLLHQTMGTFQLANQQVLNMFDYFQQTTDVPTKVLHTDDMHLPVEYAVEVGANFSKIFNGDEHVSNVGFIPGTIGRVFYQEFFDNQGNLSSTDLWDWRGFKSSTQYFGQNGKLVLERFYNLQGETVIEQYYVPDTNGNPLASRLILKNYRDQAERFFQDANHLFRFFLAELSHLDKQTTTFISDRPGTSVKPLLELQDDSHKYVTVPIYQAKDINDPIHSPLDGFLTPAFDNLQHFDGFITATESQAQHLRTRFPKAKVTVLPTVTTSPLAQSKLRPITARPKQLLYVGRLAPDRQLDQLIRTIALVKQQVKEIQCDFYGYGDPEYLKTLNKLVEELKLTNNVHLLDYHPDLETRYDDYQLLLNTDIVDGGPMSMPEAMSHGIPVISYRFNYGPKDWIDDGHDGFIVDPGNQLALRDRVIELMTDTKKLTAFSEAAFKKLHTSQTDLKVWHRWQQLLGIK

SEQ ID NO: 1054 - protein, 331 aa, Lactobacillus plantarum; identical to SEQ ID NO: 1028
  source 1..331: note = SBI05697_Glycosyltransferase

SEQ ID NO: 1055 - protein, 331 aa, Lactobacillus plantarum; identical to SEQ ID NO: 975
  source 1..331: note = SBI05697_UDP-glucose 4-epimerase

SEQ ID NO: 1056 - protein, 202 aa, Lactobacillus plantarum; identical to SEQ ID NO: 791
  source 1..202: note = SBI05697_Flavin prenyltransferase LpdB

SEQ ID NO: 1057 - protein, 399 aa, Pediococcus pentosaceus; identical to SEQ ID NO: 945
  source 1..399: note = SBS02335_Acetate kinase

SEQ ID NO: 1058 - protein, 373 aa, Pediococcus pentosaceus; identical to SEQ ID NO: 946
  source 1..373: note = SBS02335_UDP-galactopyranose mutase

SEQ ID NO: 1059 - protein, 330 aa, Pediococcus pentosaceus; identical to SEQ ID NO: 947
  source 1..330: note = SBS02335_UDP-glucose 4-epimerase

SEQ ID NO: 1060 - protein, 334 aa, Pediococcus pentosaceus; identical to SEQ ID NO: 948
  source 1..334: note = SBS02335_UDP-glucose 4-epimerase

SEQ ID NO: 1061 - protein, 324 aa, Lactobacillus brevis
  source 1..324: note = SBS04254_Phosphate acetyltransferase
MELFDSLKQKINGQNKTIVFPEGEDERVLGAASRLVADGLVKAIVLGKQSQIETTATNHAIDLSQLTILDPAQMPSDQHQAMLDALVERRKGKNTPEQAAEMLKYPNYVGTMMVYMGQADGMVSGAVHATGDTVRPALQIIKTKAGVHRISGAFIMQKGDERYVFADCAINIELDAAGMAEVAIESAHTAKVFDIDPKVAMLSFSTKGSAKGDMVTKVQEATALAHESAPDLPLDGELQFDAAFVPSVGTQKAPDSKVAGHANVFVFPELQSGNIGYKIAQRFGGFEAIGPILQGLNKPVSDLSRGCNEEDVYKVAIITAAQSL

SEQ ID NO: 1062 - protein, 396 aa, Lactobacillus brevis
  source 1..396: note = SBS04254_Acetate kinase
MGKSLAVNAGSSTLKFKLFQMPEEEVIAEGAIDRISLGNSLVEIKYGDGQKYETHQDINDHNEAIQLMLDQLTELKIITNFDEITGVGHRVVAGGQEFKDSAIIDDDVLQKIEDLAEYAPLHNPAAAMGIKAFKKILPNVVSVAVFDTSFHTSMPQENYMYAIPYEYYEKYGARKYGAHGTSHRYVAHRAAEMLGKPLEDLKLITMHLGAGGSITAIKDGKSYDTSMGFTPLAGIEMATRSGDIDASLVAYLMEKLNIEKPNDMINILNKKSGLVGVSGVSADMRDLEKVQAKNPRAKLARDMFINRIVRYVGAYLAELGGADAIVFTAGVGENDITIRQEVADKLAYFGIGVDSEKNNIRGVERDLSKAGSKIKTLLIPTDEELMIVRDIERLRK

SEQ ID NO: 1063 - protein, 339 aa, Lactobacillus brevis
  source 1..339: note = SBS04254_Glycosyltransferase
MKNNQLPRLTIVVPCYNEEPVLPNSAPILQTLLQHLIDNQQITTDSKLLFVDDGSQDQTWALITQLHHQDPLFTGLQFSRNYGQEAALMAGMQVANQYSDLIITIDADLQDDPTIIPAMIAQAQDGYDIVYGVRNDRSTDTWFKRTTAQSFYWLMGKLGVNLIPNHSDFRLLTHRVVTELMRCQESRPFIRGLIPQLGFPATKLFYKRQPRQAGVSKYPLRKMLRFALDGILSFSIAPIRAVLYVGLTICGGSLFVLLWILISHLYGTVVTGWSSIMASLWLLGGFQLVAISMIGEYIGRTFTEVKHRPRFIIQTDTYSPAFTSSHSDKISPSEDHHIY

SEQ ID NO: 1064 - protein, 372 aa, Lactobacillus brevis
  source 1..372: note = SBS04254_UDP-galactopyranose mutase
MKKYVVVGSGLFGSVFAYEAAKRGNKVIVLEKRNHVGGNIFTKEIEGIQVHMYGAHIFHTKMKRIWDYVHQFAEFNNYVNSPIANFNGEIYNLPFNMNTFNKLWGVKTPDEAKAKIKEQKEYMKIAGDPHNLEEQAISLIGPDVYEKLVKGYTEKQWGMSATELPAFIIRRLPVRFTYDNNYFSDPYQGIPVGGYTQIIEKLLNSELISVETGVDFLKKRDNYLDSETKVIFTGMIDQYFDYTLGELEYRSLRFESEIVDCDNYQGDAVVNYTDAKTPFTRIIEHKHFEFGKGNKGKTVITHEYPKNWQRGDDPYYPINNQKNKTLYKKYTEMAAREAPNVIFGGRLGQYRYYNMDQTIMAALQVAKNEFGD

SEQ ID NO: 1065 - protein, 334 aa, Lactobacillus brevis
  source 1..334: note = SBS04254_UDP-glucose 4-epimerase
MTVLVLGGAGYIGSHAVDRLVEKGYDVAVVDNLVTGHRAAVNAKARFYEGDVRDQAFLDGVFDKEDIEGVIHFAAFSVVPESMKKPLKYFDNNTAGMVSLLEVMNKHNVKKIVFSSTAATYGEPKQIPIKETDPQVPTNPYGESKLMMEKIMRWSDEAYGIKFVALRYFNVAGAKEDGSIGEDHHPETHLVPIILEVAAGERDQLAIFGDDYPTKDGTNVRDYVHVVDLADAHILALEYLKAGHDSDAFNLGSSTGFSNKEMLEAARKVTGKEIPAKMAPRRAGDPSTLIAASDKARKTLNWQPRFDNVEDIIRTAWNWKQTHPAGYNDRNEEK

SEQ ID NO: 1066 - protein, 187 aa, Lactobacillus brevis
  source 1..187: note = SBS04254_Flavin prenyltransferase LpdB
MKQIVIGVTGASGTIYAIDLLKKLRDKPDVETHLVMSPWATKNLALETSYTLAQVKAMADYTYSDRDQGAKIASGSFLHDGMVIVPASMKTVAGVAYGFGDNLIARAADVTIKERRQLIIVPRETPLSVIHLENLTKLAKLGAQIIPPIPAFYNQPQTIQDLVDHQTMKVLDAFGIQQVTAKRWEGD

SEQ ID NO: 1067 - protein, 326 aa, Leuconostoc mesenteroides
  source 1..326: note = SBS04255_Phosphate acetyltransferase
MELFEQLKNKITGQNKTIVFPEGEDPRIQGAAIRLAADNLIEPILLGDAQEISKTAQAHNFDLSNIETIDPASYDENELAKLNATLVERRKGKTDAETAAKWLQNVNYFGTMLVYTGKADGMVSGAVHPTGDTVRPALQIIKTAPGSSRISGAFIMQKGEERYVFADAAINIDIDSDTMAEIAIQSAHTAQVFDIEPKVAMLSFSTKGSAKSPLVDKVATATALAKKLAPELADSIDGELQFDAAFVESVAAAKAPDSKVAGKANTFIFPSLEAGNIGYKIAQRLGGFEAIGPILQGLAKPVSDLSRGANEEDVYKVAIITAAQAL

SEQ ID NO: 1068 - protein, 291 aa, Leuconostoc mesenteroides
  source 1..291: note = SBS04255_Glucose-1-phosphate thymidylyltransferase
MKGIILAGGSGTRLYPITKATSKQLVPIYDKPMIYYPLSVLMLAGIKDILLISTPEYVGRFEELFGNGHEIGLNIEYTIQEEPRGLADAFIVGADFIGDDAVALVLGDNIFYGAGLSEKLQQAALKTSGATVFGYQVKDPERFGVVEFDKEGKALSIVEKPEQPKSNYAVTGLYFYDNDVVKIAANVKPSERGEIEISDINQSYLDRGDLDVQVMGRGYAWLDTGTHDSLLEASSFIATIQKQQNLKVASLEEIAYRMGYIDIAQLEKLAQPLKKNDYGQYLLRIVDEEGE

SEQ ID NO: 1069 - protein, 280 aa, Leuconostoc mesenteroides
  source 1..280: note = SBS04255_dTDP-4-dehydrorhamnose reductase
MKFLITGANGQLGQELQKLLRERGLDFVAFDSKQLDITNSAAVLSAFEQEQPDVVLHAAAYTKVDLAEDDGRELNWQVNVDGTKNVADAAKLYEAKLVAVSTDYVFDGTNEGEYLESDAVNPQNAYGRAKLAGELAVTESGADAYIVRTSWVFGEFGNNFVYTMQRLAATHPKLTVVNDQLGRPTWTRTLAEFMLHLVDTKAAYGIYHLSNDGIATWFDFAREILKDTDVEVAPVTSAEFPQKAYRPKHSVMSLDKAKATGFEILSWREALQSFLNSIVS

SEQ ID NO: 1070 - protein, 396 aa, Leuconostoc mesenteroides
  source 1..396: note = SBS04255_UDP-galactopyranose mutase
MTNQFNTKNYDYLIVGAGPFGMIFAHEAAKRGKRSLVVEKRPYIGGNTHTHTEHGITVHDFGAHIFHTDNKEVWDYIRKFAEFNGYQNQVVANYKGTLYNLPFNMNTFYQMWGTKTPDEAHAKIEEQKQIALKDLGDRQPRNLEEQAISLIGTDIYNKLIKGYTEKQWGRKATELPAFIIKRLPVRFIYDNNYFNHRYQGIPVGGYTQIFENMVAESNGLVDVLTDTDFFDYKETLLSEFPRVLYTGMIDQFFDYKFGELEYRSLRFEHEVIDSDNYQGNAVINYTDSETPYTRVMEWKHLDGLADEGKTIITKEYPQEWDRSKEAYYPVNNDKNTQIYKAYATEARKSHPEIIFGGRLGKYRYFDMDQVFNDAFNTVRQEFDIDQEFNFAHDQVK

SEQ ID NO: 1071 - protein, 330 aa, Leuconostoc mesenteroides
  source 1..330: note = SBS04255_UDP-glucose 4-epimerase
MAILVLGGAGYIGSHMVKRLIEADRDVVVVDALFTGHREAVNPKAKFYQVDIRDKTALSEVFDKENIEQVVHFAAFSIVPESVANPLKYFDNNTSGMITLLEVMKEHDVKQIVFSSTAATYGNPINIPIKETDPQRPINPYGESKLMMEKIMAWSDQADGVKWVALRYFNVAGAAEDGTIGEDHAPETHLVPIILQAGLGQREYIEMFGDDYNTPDGFNVRDYVHVLDLADAHILALKYLADGNDSNQFNLGSATGFSVKEMVEAARSATGVDIPAKIGPRRAGDPDILIANSDKARDVLGWAPKYDNVQDIIKTAWNWHKNHPSGYNDK

SEQ ID NO: 1072 - protein, 325 aa, Lactobacillus plantarum; identical to SEQ ID NO: 775
  source 1..325: note = SBS04260_Phosphate acetyltransferase

SEQ ID NO: 1073 - protein, 603 aa, Lactobacillus plantarum; identical to SEQ ID NO: 965
  source 1..603: note = SBS04260_Pyruvate oxidase

SEQ ID NO: 1074 - protein, 397 aa, Lactobacillus plantarum; identical to SEQ ID NO: 967
  source 1..397: note = SBS04260_Acetate kinase

SEQ ID NO: 1075 - protein, 331 aa, Lactobacillus plantarum; identical to SEQ ID NO: 970
  source 1..331: note = SBS04260_Glycosyltransferase

SEQ ID NO: 1076 - protein, 505 aa, Lactobacillus plantarum; identical to SEQ ID NO: 969
  source 1..505: note = SBS04260_Poly(Glycerol-phosphate) alpha-glucosyltransferase

SEQ ID NO: 1077 - protein, 331 aa, Lactobacillus plantarum; identical to SEQ ID NO: 975
  source 1..331: note = SBS04260_UDP-glucose 4-epimerase

SEQ ID NO: 1078 - protein, 334 aa, Lactobacillus plantarum; identical to SEQ ID NO: 968
  source 1..334: note = SBS04260_UDP-glucose 4-epimerase

SEQ ID NO: 1079 - protein, 185 aa, Lactobacillus plantarum; identical to SEQ ID NO: 971
  source 1..185: note = SBS04260_exopolysaccharide biosynthesis protein

SEQ ID NO: 1080 - protein, 235 aa, Lactobacillus plantarum; identical to SEQ ID NO: 781
  source 1..235: note = SBS04260_exopolysaccharide biosynthesis protein

SEQ ID NO: 1081 - protein, 273 aa, Lactobacillus plantarum; identical to SEQ ID NO: 780
  source 1..273: note = SBS04260_Tyrosine-protein phosphatase

SEQ ID NO: 1082 - protein, 221 aa, Lactobacillus plantarum; identical to SEQ ID NO: 974
  source 1..221: note = SBS04260_Sugar transferase

SEQ ID NO: 1083 - protein, 289 aa, Lactobacillus plantarum; identical to SEQ ID NO: 976
  source 1..289: note = SBS04260_Glucose-1-phosphate thymidylyltransferase

SEQ ID NO: 1084 - protein, 193 aa, Lactobacillus plantarum; identical to SEQ ID NO: 977
  source 1..193: note = SBS04260_dTDP-4-dehydrorhamnose 3,5-epimerase

SEQ ID NO: 1085 - protein, 281 aa, Lactobacillus plantarum; identical to SEQ ID NO: 978
  source 1..281: note = SBS04260_dTDP-4-dehydrorhamnose reductase

SEQ ID NO: 1086 - protein, 202 aa, Lactobacillus plantarum; identical to SEQ ID NO: 791
  source 1..202: note = SBS04260_Flavin prenyltransferase LpdB

SEQ ID NO: 1087 - protein, 500 aa, Saccharomyces boulardii
  source 1..500: note = CS00018_Magnesium-activated aldehyde dehydrogenase
MTKLHFDTAEPVKITLPNGLTYEQPTGLFINNKFMKAQDGKTYPVEDPSTENTVCEVSSATTEDVEYAIECADRAFHDTEWATQDPRERGRLLSKLADELESQIDLVSSIEALDNGKTLALARGDVTIAINCLRDAAAYADKVNGRTINTGDGYMNFTTLEPIGVCGQIIPWNFPIMMLAWKIAPALAMGNVCILKPAAVTPLNALYFASLCKKVGIPAGVVNIVPGPGRTVGAALTNDPRIRKLAFTGSTEVGKSVAVDSSESNLKKITLELGGKSAHLVFDDANIKKTLPNLVNGIFKNAGQICSSGSRIYVQEGIYDELLAAFKAYLETEIKVGNPFDKANFQGAITNRQQFDTIMNYIDIGKKEGAKILTGGEKVGDKGYFIRPTVFYDVNEDMRIVKEEIFGPVVTVAKFKTLEEGVEMANSSEFGLGSGIETESLSTGLKVAKMLKAGTVWINTYNDFDSRVPFGGVKQSGYGREMGEEVYHAYTEVKAVRIKL

SEQ ID NO: 1088 - protein, 486 aa, Saccharomyces boulardii
  source 1..486: note = CS00018_Citrate synthase 3
MVQRLLPGAHICRRSFNSSAIIKSSALTLKEALENVIPKKRDAVKKLKACYGSTFVGPITISSVLGGMRGNQSMFWQGTSLDPEHGIKFQGLTIEECQNRLPNTGIDGDNFLPESMLWLLMTGGVPTFQQAASFRKELAIRGRKLPHYTEKVLSSLPKDMHPMTQLAIGLASMNKGSLFATNYQKGLIGKMEFWKDTLEDSLNLIASLPLLTGRIYSNITNEGHPLGQYSEEVDWCTNICSLLGMTNGTNSSNTCNLTSQQSLDFINLMRLYTGIHVDHEGGNVSAHTTHLVGSALSDPYLSYSSGIMGLAGPLHGLAAQEVVRFLIEMNSNISSIAREQEIKDYLWKILNSNRVIPGYGHAVLRKPDPRFTAMLEFAQKRPIEFENDKNVLLMQKLAEIAPKVLLEHGKSKNPFPNVDSASGILFYHYGIRELLFFTVIFGCSRAMGPLTQLVWDRILGLPIERPKSLNLEGLEALTKASNVNKL

SEQ ID NO: 1089 - protein, 519 aa, Saccharomyces boulardii
  source 1..519: note = CS00018_Aldehyde dehydrogenase 5
MFSRSTLCLKTSASSIGRLQLRYFSHLPMTVPIKLPNGLEYEQPTGLFINNKFVPSKQNKTFEVINPSTEEEICHIYEGREDDVEEAVQAADRAFSNGSWNGIDPIDRGKALYRLAELIEQDKDVIASIETLDNGKAISSSRGDVDLVINYLKSSAGFADKIDGRMIDTGRTHFSYTKRQPLGVCGQIIPWNFPLLMWAWKIAPALVTGNTVVLKTAESTPLSALYVSKYIPQAGIPPGVINIVSGFGKIVGEAITNHPKIKKVAFTGSTATGRHIYQSAAAGLKKVTLELGGKSPNIVFADAELKKAVQNIILGIYYNSGEVCCAGSRVYVEESIYDKFIEEFKAASESIKVGDPFDESTFQGAQTSQMQLNKILKYVDIGKNEGATLITGGERLGSKGYFIKPTVFGDVKEDMRIVKEEIFGPVVTVTKFKSADEVINMANDSEYGLAAGIHTSNINTALKVADRVNAGTVWINTYNDFHHAVPFGGFNASGLGREMSVDALQNYLQVKAVRAKLDE

SEQ ID NO: 1090 - protein, 329 aa, Saccharomyces boulardii
  source 1..329: note = CS00018_Succinate--CoA ligase subunit alpha
MLRSTVSKASLKICRHFHRESIPYDKTIKNLLLPKDTKVIFQGFTGKQGTFHASISQEYGTNVVGGTNPKKAGQTHLGQPVFASVKDAIKETGATASAIFVPPPIAAAAIKESIEAEIPLAVCITEGIPQHDMLYIAEMLQTQDKTRLVGPNCPGIINPATKVRIGIQPPKIFQAGKIGIISRSGTLTYEAVQQTTKTDLGQSLVIGMGGDAFPGTDFIDALKLFLEDETTEGIIMLGEIGGKAEIEAAQFLKEYNFSRSKPMPVASFIAGTVAGQMKGVRMGHSGAIVEGSGTDAESKKKALRDVGVAVVESPGYLGQALLDQFAKFK

SEQ ID NO: 1091 - protein, 162 aa, Saccharomyces boulardii
  source 1..162: note = CS00018_Succinate dehydrogenase assembly factor 2
MHNMFPALTKTLSLQGYKIINSQTGSAAWSCGRRWFSSDKDDHDDVVTRIKIAPIKRTNEPLDKKRARLIYQSRKRGILETDLLLSGFAAKYLKKMNEEELEEYDSLLNELDWDIYYWATKNFKTSPLPDKWANSKLLKQLQEFSENKEKEILSMPALSKYQ

SEQ ID NO: 1092 - protein, 348 aa, Saccharomyces boulardii
  source 1..348: note = CS00018_Alcohol dehydrogenase
MSIPETQKGVIFYESHGKLEYKDIPVPKPKANELLINVKYSGVCHTDLHAWHGDWPLPTKLPLVGGHEGAGVVVGMGENVKGWKIGDYAGIKWLNGSCMACEYCELGNESNCPHADLSGYTHDGSFQEYATADAVQAAHIPQGTDLAEVAPVLCAGITVYKALKSANLMAGHWVAISGAAGGLGSLAVQYAKAMGYRVLGIDGGEGKEELFRSIGGEVFIDFTKEKDIVGAVLKATDGGAHGVINVSVSEAAIEASTRYVRANGTTVLVGMPAGAKCCSDVFNQVVKSISIVGSYVGNRADTREALDFFARGLVKSPIKVVGLSTLPEIYEKMEKGQIVGRYVVDTSK

SEQ ID NO: 1093 - protein, 420 aa, Saccharomyces boulardii
  source 1..420: note = CS00018_Isocitrate dehydrogenase
MSKIKVVHPIVEMDGDEQTRVIWKLIKEKLILPYLDVDLKYYDLSIQERDRTNDQVTKDSAYATLKYGVAVKCATITPDEARMKEFNLKEMWKSPNGTIRNILGGTVFREPIIIPKIPRLVPHWEKPIIIGRHAFGDQYRATDIKIKKAGKLRLQFSSDDGKENIDLKVYEFPKSGGIAMAMFNTNDSIKGFAKASFELALKRKLPLFFTTKNTILKNYDNQFKQIFDNLFDKEYKEKFQALKITYEHRLIDDMVAQMLKSKGGFIIAMKNYDGDVQSDIVAQGFGSLGLMTSILITPDGKTFESEAAHGTVTRHFRKHQRGEETSTNSIASIFAWTRAIIQRGKLDNTDDVIKFGNLLEKATLDTVQVGGKMTKDLALMLGKTNRSSYVTTEEFIDEVAKRLQNMMLSSNEDKKGVCKL

SEQ ID NO: 1094 - protein, 554 aa, Saccharomyces boulardii
  source 1..554: note = CS00018_Malate synthase 1
MVKVSLDNVKLLVDVDKEPFFKPSSTTVGDILTKDALEFIVLLHRTFNNKRKQLLENRQVVQKKLDSGSYHLDFLPETANIRNDPTWQGPILAPGLINRSTEITGPPLRNMLINALNAPVNTYMTDFEDSASPTWNNMVYGQVNLYDAIRNQIDFDTPRKSYKLNGNVANLPTIIVRPRGWHMVEKHLYVDDEPISASIFDFGLYFYHNAKELIKLGKGPYFYLPKMEHHLEAKLWNDVFCVAQDYIGIPRGSIRATVLIETLPAAFQMEEIIYQLRQHSSGLNCGRWDYIFSTIKRLRNDPNHILPNRDQVTMTSPFMDAYVKRLINTCHRRGVHAMGGMAAQIPIKDDPAANEKAMTKVRNDKIRELTNGHDGSWVAHPALAPICNEVFINMGTPNQIYFIPENVVTAANLLETKIPNGEITTEGIVQNLDIGLQYMEAWLRGSGCVPINNLMEDAATAEVSRCQLYQWVKHGVTLKDTGEKVTPELTEKILKEQVERLSKASPLGDKNKFALAAKYFLPEIRGEKFSEFLTTLLYDEIVSTKATPTDLSKL

SEQ ID NO: 1095 - protein, 375 aa, Saccharomyces boulardii [sequence omitted]

SEQ ID NO: 1096 - protein, 532 aa, Saccharomyces boulardii
  source 1..532: note = CS00018_Fatty aldehyde dehydrogenase
MSNDGSKILNYTPVSKIDEIVEISRNFFFEKQLKLSHENNPRKKDLEFRQLQLKKLYYAVKDHEEELIDAMYKDFHRNKIESVLNETTKLMNDILHLIEILPKLIKPRRVSDSSPPFMFGKTIVEKISRGSVLIIAPFNFPLLLAFAPLAAALAAGNTIVLKPSELTPHTAVVMENLLTTAGFPDGLIQVVQGAIDETTRLLDCGKFDLIFYTGSPRVGSIVAEKAAKSLTPCVLELGGKSPTFITENFKASNIKIALKRIFFGAFGNSGQICVSPDYLLVHKSIYPKVIKECESVLNEFYPSFDEQTDFTRMIHEPAYKKAVASINSTNGSKIVPSKISINSDTEDLCLVPPTIVYNIGWDDPLMKQENFAPVLPIIEYEDLDETINKIIEEHDTPLVQYIFSDSQTEINRILTRLRSGDCVVGDTVIHVGITDAPFGGIGTSGYGNYGGYYGFNTFSHERTIFKQPYWNDFTLFMRYPPNSAQKEKLVRFAMERKPWFDRNGNNKWGLRQYFSLSAAVILISTIYAHCSS

SEQ ID NO: 1097 - protein, 196 aa, Saccharomyces boulardii
  source 1..196: note = CS00018_Mitochondrial membrane protein SHH3
MKATIQRVTSLFGVPRASVFVPRISTPFILHSYITNGRMVLFSKEFHNGRVSKSDLWSSNKEEELLVSQRKKRPISPHLTVYEPEMSWYLSSLHRISGVLLALGFYAFTITLGVTTIMGMDTTFQDLNKWYHEKMPKWSQWVAKGSAAYLFAFHFGNGIRHLIWDMGYELTNRGVIKTGSIVLAGTLVLGTYLLAQ

SEQ ID NO: 1098 - protein, 506 aa, Saccharomyces boulardii
  source 1..506: note = CS00018_Aldehyde dehydrogenase [NAD(P)+]
MPTLYTDIEIPQLKISLKQPLGLFINNEFCPSSDGKTIETVNPATGEPITSFQAANEKDVDKAVKAARAAFDNVWSKTSSEQRGIYLSNLLKLIEEEQDTLAALETLDSGKPFHSNAKQDLAQIIELTRYYAGAVDKFNMGETIPLTFNKFAYTLKVPFGVVAQIVPWNYPLAMACRKMQGALAAGNTVIIKPAENTSLSLLYFATLIKKAGFPPGVVNVIPGYGSVVGKALGTHMDIDKISFTGSTKVGGSVLEASGQSNLKDITLECGGKSPALVFEDADLDKAIEWVANGIFFNSGQICTANSRVYVQSSIYDKFVEKFKETAKKEWDVAGKFDPFDEKCIVGPVISSTQYDRIKSYIERGKKEEKLDMFQTSEFPIGGAKGYFIPPTIFTDVPETSKLLRDEIFGPVVVVSKFTNYDDALKLANDTCYGLASAVFTKDVKKAHMFARDIKAGTVWINQTNQEEAKVPFGGFKMSGIGRESGDTGVDNYLQIKSVHVDLSLDK

SEQ ID NO: 1099 - protein, 506 aa, Saccharomyces boulardii
  source 1..506: note = CS00018_Aldehyde dehydrogenase [NAD(P)+]
MPTLYTDIEIPQLKISLKQPLGLFINNEFCPSSDGKTIETVNPATGEPITSFQAANEKDVDKAVKAARAAFDNVWSKTSSEQRGIYLSNLLKLIEEEQDTLAALETLDAGKPYHSNAKGDLAQILQLTRYFAGSADKFDKGATIPLTFNKFAYTLKVPFGVVAQIVPWNYPLAMACWKLQGALAAGNTVIIKPAENTSLSLLYFATLIKKAGFPPGVVNIVPGYGSLVGQALASHMDIDKISFTGSTKVGGFVLEASGQSNLKDVTLECGGKSPALVFEDADLDKAIDWIAAGIFYNSGQNCTANSRVYVQSSIYDKFVEKFKETAKKEWDVAEKFDPFDEKCIVGPVISSTQYDRIKSYIERGKREEKLGMFQTSEFPIGGAKGYFIPPTIFTDVPQTSKLLQDEIFGPVVVVSKFTNYDDALKLANDTCYGLASAVFTKDVKKAHMFARDIKAGTVWINSSNDEDVTVPFGGFKMSGIGRELGQSGVDTYLQTKAVHINLSLDN

SEQ ID NO: 1100 - protein, 348 aa, Saccharomyces boulardii
  source 1..348: note = CS00018_Alcohol dehydrogenase
MSIPETQKAIIFYESNGKLEHKDIPVPKPKPNELLINVKYSGVCHTDLHAWHGDWPLPTKLPLVGGHEGAGVVVAIGDNVRGWKIGDYAGIKWLNGSCMACEYCELGNESNCPHADLSGYTHDGSFQEYATADAVQAAHIPQGTDLAEVAPVLCAGITVYKALKSANLRAGHWVAISGAAGGLGSLAVQYAKAMGYRVLGIDGGPGKEELFTSLGGEVFIDFTKEKDIVSAVVKATNGGAHGIINVSVSEAAIEASTRYCRANGTVVLVGLPAGAKCSSDVFNHVVKSISIVGSYVGNRADTREALDFFARGLVKSPIKVVGLSSLPEIYEKMEKGQIAGRYVVDTSK

SEQ ID NO: 1101 - protein, 266 aa, Saccharomyces boulardii
  source 1..266: note = CS00018_Succinate dehydrogenase iron-sulfur subunit
MLNVLLRRKAFCLVTKKGMATATTAAATHTPRLKTFKVYRWNPDEPSAKPHLQSYQVDLNDCGPMVLDALLKIKDEQDSTLTFRRSCREGICGSCAMNIGGRNTLACICKIDQNESKQLKIYPLPHMFIVKDLVPDLTNFYQQYKSIQPYLQRSSFPKDGTEVLQSIEDRKKLDGLYECILCACCSTSCPSYWWNQEQYLGPAVLLQAYRWLIDSRDQATKTRKAMLNNSMSLYRCHTIMNCTRTCPKGLNPGLAIAEIKKSLAFA

SEQ ID NO: 1102 - protein, 563 aa, Saccharomyces boulardii
  source 1..563: note = CS00018_Pyruvate decarboxylase isozyme
MSEITLGKYLFERLKQVNVNTVFGLPGDFNLSLLDKIYEVEGMRWAGNANELNAAYAADGYARIKGMSCIITTFGVGELSALNGIAGSYAEHVGVLHVVGVPSISAQAKQLLLHHTLGNGDFTVFHRMSANISETTAMITDIATAPAEIDRCIRTTYVTQRPVYLGLPANLVDLNVPAKLLQTPIDMSLKPNDAESEKEVIDTILALVKDAKNPVILADACCSRHDVKAETKKLIDLTQFPAFVTPMGKGSIDEQHPRYGGVYVGTLSKPEVKEAVESADLILSVGALLSDFNTGSFSYSYKTKNIVEFHSDHMKIRNATFPGVQMKFVLQKLLTTIADAAKGYKPVAVPARTPANAAVPASTPLKQEWMWNQLGNFLQEGDVVIAETGTSAFGINQTTFPNNTYGISQVLWGSIGFTTGATLGAAFAAEEIDPKKRVILFIGDGSLQLTVQEISTMIRWGLKPYLFVLNNDGYTIEKLIHGPKAQYNEIQGWDHLSLLPTFGAKDYETHRVATTGEWDKLTQDKSFNDNSKIRMIEIMLPVFDAPQNLVEQAKLTAATNAKQ

SEQ ID NO: 1103 - protein, 563 aa, Saccharomyces boulardii
  source 1..563: note = CS00018_Pyruvate decarboxylase isozyme
MSEITLGKYLFERLSQVNCNTVFGLPGDFNLSLLDKLYEVKGMRWAGNANELNAAYAADGYARIKGMSCIITTFGVGELSALNGIAGSYAEHVGVLHVVGVPSISSQAKQLLLHHTLGNGDFTVFHRMSANISETTAMITDIANAPAEIDRCIRTTYTTQRPVYLGLPANLVDLNVPAKLLETPIDLSLKPNDAEAEAEVVRTVVELIKDAKNPVILADACASRHDVKAETKKLMDLTQFPVYVTPMGKGAIDEQHPRYGGVYVGTLSRPEVKKAVESADLILSIGALLSDFNTGSFSYSYKTKNIVEFHSDHIKIRNATFPGVQMKFALQKLLDAIPEVVKDYKPVAVPARVPITKSTPANTPMKQEWMWNHLGNFLREGDIVIAETGTSAFGINQTTFPTDVYAIVQVLWGSIGFTVGALLGATMAAEELDPKKRVILFIGDGSLQLTVQEISTMIRWGLKPYIFVLNNNGYTIEKLIHGPHAEYNEIQGWDHLALLPTFGARNYETHRVATTGEWEKLTQDKDFQDNSKIRMIEVMLPVFDAPQNLVKQAQLTAATNAKQ

SEQ ID NO: 1104 - protein, 683 aa, Saccharomyces boulardii
  source 1..683: note = CS00018_Acetyl-coenzyme A synthetase
MTIKEHKVVHEAHNVKALKAPQHFYNSQPGKGYVTDMQHYQEMYQQSINEPEKFFDKMAKEYLHWDAPYTKVQSGSLNNGDVAWFLNGKLNASYNCVDRHAFANPDKPALIYEADDESDNKIITFGELLRKVSQIAGVLKSWGVKKGDTVAIYLPMIPEAVIAMLAVARIGAIHSVVFAGFSAGSLKDRVVDANSKVVITCDEGKRGGKTINTKKIVDEGLNGVDLVSRILVFQRTGTEGIPMKAGRDYWWHEEAAKQRTYLPPVSCDAEDPLFLLYTSGSTGSPKGVVHTTGGYLLGAALTTRYVFDIHPEDVLFTAGDVGWITGHTYALYGPLTLGTASIIFESTPAYPDYGRYWRIIQRHKATHFYVAPTALRLIKRVGEAEIAKYDTSSLRVLGSVGEPISPDLWEWYHEKVGNKNCVICDTMWQTESGSHLIAPLAGAVPTKPGSATVPFFGINVCIIDPVTGVELEGNDVEGVLAVKSPWPSMARSVWNHHDRYMDTYLKPYPGHYFTGDGAGRDHDGYYWIRGRVDDVVNVSGHRLSTSEIEASISNHENVSEAAVVGIPDELTGQTVVAYVSLKDGYLQNNATEGDAEHITPDNLRRELILQVRGEIGPFASPKTIILVRDLPRTRSGKIMRRVLRKVASNEAEQLGDLTTLANPEVVPAIISAVENQFFSQKKK

SEQ ID NO: 1105 - protein, 234 aa, Saccharomyces boulardii
  source 1..234: note = CS00018_Mitochondrial membrane protein SHH4
MVLSDSHIQIGVPLSEVSLNFDVEFHRSKPIYFQSPVDRPFISSNESAKILKKVAPILRKVGMSSTKFLKPLCRIRAFHTSIARSFTIPFLPKIPQKPGGVSGTANDSSYMPPESRAQGSYHWIVERGLSLAVLPLIAVPLVTTGPISTFTDTFLSLVLLGHCHIGFQSCIIDYISERVYGKVHHYAMYLLSLGSFLSFVGIYKLESQEAGLIASLKSLWDNKPVEKKEAVIIN

SEQ ID NO: 1106 - protein, 412 aa, Saccharomyces boulardii
  source 1..412: note = CS00018_Isocitrate dehydrogenase
MTKIKVANPIVEMDGDEQTRIIWHLIRDKLVLPYLDVDLKYYDLSVEYRDQTNDQVTVDSATATLKYGVAVKCATITPDEARVEEFHLKKMWKSPNGTIRNILGGTVFREPIIIPRIPRLVPQWEKPIIIGRHAFGDQYKATDVIVPEEGELRLVYKSKSGTHDVDLKVFDYPEHGGVAMMMYNTTDSIEGFAKASFELAIERKLPLYSTTKNTILKKYDGKFKDVFEAMYARSYKEKFESLGIWYEHRLIDDMVAQMLKSKGGYIIAMKNYDGDVESDIVAQGFGSLGLMTSVLITPDGKTFESEAAHGTVTRHFRQHQQGKETSTNSIASIFAWTRGIIQRGKLDNTPDVVKFGQILESATVNTVQEDGIMTKDLALILGKSERSAYVTTEEFIDAVESRLKKEFEAAAL

SEQ ID NO: 1107 - protein, 669 aa, Saccharomyces boulardii
  source 1..669: note = CS00018_NAD-dependent malic enzyme
MLRTRLSVSVAARSQLTRSLTASRTAPLRRWPIQQSRLYSSNTRSHKATTTRENTFQKPYSDEEVTKTPVGSRARKIFEAPHPHATRLTVEGAIECPLESFQLLNSPLFNKGSAFTQEEREAFNLEALLPPQVNTLDEQLERSYKQLCYLKTPLAKNDFMTSLRVQNKVLYFALIRKHIKELVPIIYTPTEGDAIAAYSHRFRKPEGVFLDITEPDSIERRLATYGGDKDVDYIVVSDSEGILGIGDQGIGGVRIAISKLALMTLCGGIHPGRVLPVCLDVGTNNKKLARDELYMGNKFSRIRGKQYDDFLEKFIKAVKKVYPSAVLHFEDFGVKNARRLLEKYRYELPSFNDDIQGTGAVVMASLIAALKHTNRDLKDTRVLIYGAGSAGLGIADQIVNHMVTHGVDKEEARKKIFLMDRRGLILQSYEANSTPAQHVYAKSDAEWAGINTRSLHDVVENVKPTCLVGCSTQAGAFTQDVVEEMHKHNPRPIIFPLSNPTRLHEAVPADLMKWTNNNALVATGSPFPPVDGYRISENNNCYSFPGIGLGAVLSRATTITDKMISAAVDQLAELSPLREGDSRPGLLPGLDTITNTSARLATAVVLQALEEGTARIEQEQVPGGAPGETVKVPRDFDECLQWVKAQMWEPVYRPMIKVQHDPSVHTNQL

SEQ ID NO: 1108 - protein, 640 aa, Saccharomyces boulardii
  source 1..640: note = CS00018_Probable succinate dehydrogenase flavoprotein
MLSLKKSALSKLTLLRNTRTFTSSALVRQTQGSVNGSASRSADGKYHIIDHEYDCVVIGAGGAGLRAAFGLAEAGYKTACISKLFPTRSHTVAAQGGINAALGNMHKDNWKWHMYDTVKGSDWLGDQDSIHYMTREAPKSIIELEHYGVPFSRTENGKIYQRAFGGQTKEYGKGAQAYRTCAVADRTGHALLHTLYGQALRYDTHFFIEYFALDLLTHNGEVVGVIAYNQEDGTIHRFRAHKTIIATGGYGRAYFSCTSAHTCTGDGNAMVSRAGFPLQDLEFVQFHPSGIYGSGCLITEGARGEGGFLVNSEGERYMERYAPTAKDLACRDVVSRAITMEIREGRGVGKKKDHMYLQLSHLPPEVLKERLPGISETAAIFAGVDVTKEPIPIIPTVHYNMGGIPTKWNGEALTIDEETGEDKVIPGLMACGEAACVSVHGANRLGANSLLDLVVFGRAVAHTVADTLQPGLPHKPLPSDLGKESIANLDKLRNANGSRSTAEIRMNMKQTMQKDVSVFRTQSSLDEGVRNITAVEKTFDDVKTTDRSMIWNSDLVETLELQNLLTCASQTAVSAANRKESRGAHAREDYPNRDDEHWMKHTLSWQKDVAAPVTLKYRRVIDHTLDEKECPSVPPTVRAY

SEQ ID NO: 1109 - protein, 601 aa, Saccharomyces boulardii
  source 1..601: note = CS00018_Probable succinate dehydrogenase flavoprotein
MLSLKKGITKSYILQRTFTSSSVVRQIGEVKSESKPPAKYHIIDHEYDCVVVGAGGAGLRAAFGLAEAGYKTACLSKLFPTRSHTVAAQGGINAALGNMHPDDWKSHMYDTVKGSDWLGDQDAIHYMTREAPKSVIELEHYGMPFSRTEDGRIYQRAFGGQSKDFGKGGQAYRTCAVADRTGHAMLHTLYGQALKNNTHFFIEYFAMDLLTHNGEVVGVIAYNQEDGTIHRFRAHKTVIATGGYGRAYFSCTSAHTCTGDGNAMVSRAGFPLEDLEFVQFHPSGIYGSGCLITEGARGEGGFLLNSEGERFMERYAPTAKDLASRDVVSRAITMEIRAGRGVGKNKDHILLQLSHLPPEVLKERLPGISETAAVFAGVDVTQEPIPVLPTVHYNMGGIPTKWTGEALTIDEETGEDKVIPGLMACGEAACPGLPHKPLASNIGHESIANLDKVRNARGSLKTSQIRLNMQRTMQKDVSVFRTQDTLDEGVRNITEVDKTFEDVHVSDKSMIWNSDLVETLELQNLLTCATQTAVSASKRKESRGAHAREDYAKRDDVNWRKHTLSWQKGTSTPVKIKYRNVIAHTLDENECAPVPPAVRSY

SEQ ID NO: 1110 - protein, 554 aa, Saccharomyces boulardii
  source 1..554: note = CS00018_Malate synthase 1
MVKISLDNTALYADIDTTPQFEPSKTTVADILTKDALEFIVLLHRTFNSRRKQLLANRSNLQSKLDSGEYRFDFLPETEQIRNDPTWQGAIPAPGLINRSSEITGPPLRNMLVNALNAEVTTYMTDFEDSSSPTWENMIYGQVNLYDAIRNQIDFKTPRKEYRLKDDISRLPTLIVRPRGWHMVEKHLYIDDEPISASIFDFGLYFYHNAKELVKIGKGPYFYLPKMEHHMEVKLWNDIFCVAQDFIGMPRGTIRATVLIETLPAAFQMEEIIYQIREHSSGLNCGRWDYIFSTIKKLRNLPEHVLPNRDLVTMTSPFMDAYVKRLINTCHRRGVHAMGGMAAQIPIKDDPKANEAAMNKVRNDKIREMKNGHDGSWVAHPALAPICNEVFSNMGTANQIYFVPDVHVTSSDLLNTKIQDAQVTTEGIRVNLDIGLQYMEAWLRGSGCVPINHLMEDAATAEVSRCQLYQWVKHGVVLSDTGDKVTPELTAKILNEETAKLASASPLGEKNKFALAAKYFLPEVTGKIFSDFLTTLLYDEIIKPSAKPVDLSKL

SEQ ID NO: 1111 - protein, 513 aa, Saccharomyces boulardii
  source 1..513: note = CS00018_aromatic amino acid aminotransferase
MTAGSAPPVDYTSLKKNFQPFLSRRVENRSLKSFWDASDISDDVIELAGGMPNERFFPIESMDLKISKVPFNDNPKWHNSFTTAHLDLGSPSELPIARSFQYAETKGLPPLLHFVKDFVSRINRPAFSDETESNWDVILSGGSNDSMFKVFETICDESTTVMIEEFTFTPAMSNVEATGAKVIPIKMNLTFDRESQGIDVEYLTQLLDNWSTGPYKDLNKPRVLYTIATGQNPTGMSVPQWKREKIYQLAQRHDFLIVEDDPYGYLYFPSYNPQEPLENPYHSSDLTTERYLNDFLMKSFLTLDTDARVIRLETFSKIFAPGLRLSFIVANKFLLQKILDLADITTRAPSGTSQAIVYSTIKAMAESNLSSSLSMKEAMFEGWIRWIMQIASKYNHRKNLTLKALYETESYQAGQFTVMEPSAGMFIIIKINWGNFDRPDDLPQQMDILDKFLLKNGVKLVLGYKMAVCPNYSKQNSDFLRLTIAYARDDDQLIEASKRIGSGIKEFFDNYKS

SEQ ID NO: 1112 - protein, 427 aa, Saccharomyces boulardii
  source 1..427: note = CS00018_Succinate--CoA ligase subunit beta
MYSRKSLSLISKCGQLSRLNAQAALQARRHLSIHEYRSAQLLREYGIGTPEGFPAFTPEEAFEAAKKLNTNKLVIKAQALTGGRGKGHFDTGYKSGVHMIESPQQAEDVAKEMLNHNLITKQTGIAGKPVSAVYIVKRVDTKHEAYLSILMDRQTKKPMIIASSQGGMNIEEVAERTPDAIKKFSIETSKGLSPQMAKDVAKSLGFSPDAQDEAAKAVSNLYKIFMERDATQVEINPLSEIEHDPTHKIMCTDAKFGFDDNASFRQEKIYSWRDLSQEDPDEVKAKKYDLNFVKLKGNIGCLVNGAGLAMATMDVIKLNGGDPANFLDCGGGATPETIKQGFELILSNKNVDAIFVNIFGGIVRCDYVALGLVEAARELEVRVPIVARLQGTKVEEGRDIINKSGVKIYSFDELDPAAKKVVELTQN

SEQ ID NO: 1113 - protein, 563 aa, Saccharomyces boulardii
  source 1..563: note = CS00018_Pyruvate decarboxylase isozyme
MSEITLGKYLFERLKQVNVNTIFGLPGDFNLSLLDKIYEVDGLRWAGNANELNAAYAADGYARIKGLSVLVTTFGVGELSALNGIAGSYAEHVGVLHVVGVPSISAQAKQLLLHHTLGNGDFTVFHRMSANISETTSMITDIATAPSEIDRLIRTTFITQRPSYLGLPANLVDLKVPGSLLEKPIDLSLKPNDPEAEKEVIDTVLELIQNSKNPVILSDACASRHNVKKETQKLIDLTQFPAFVTPLGKGSIDEQHPRYGGVYVGTLSKQDVKQAVESADLILSVGALLSDFNTGSFSYSYKTKNVVEFHSDYVKVKNATFLGVQMKFALQNLLKVIPDVVKGYKSVPVPTKTPANKGVPASTPLKQEWLWNELSKFLQEGDVIISETGTSAFGINQTIFPKDAYGISQVLWGSIGFTTGATLGAAFAAEEIDPNKRVILFIGDGSLQLTVQEISTMIRWGLKPYLFVLNNDGYTIEKLIHGPHAEYNEIQTWDHLALLPAFGAKKYENHKIATTGEWDALTTDSEFQKNSVIRLIELKLPVFDAPESLIKQAQLTAATNAKQ

SEQ ID NO: 1114 - protein, 382 aa, Saccharomyces boulardii
  source 1..382: note = CS00018_Alcohol dehydrogenase
MSSVTGFYIPPISFFGEGALEETADYIKNKDYKKALIVTDPGIAAIGLSGRVQKMLEERGLNVAIYDKTQPNPNIANVTAGLKVLKEENSEIVVSIGGGSAHDNAKAIALLATNGGEIGDYEGVNQSKKAALPLFAINTTAGTASEMTRFTIISNEEKKIKMAIIDNNVTPAVAVNDPSTMFGLPPALTAATGLDALTHCIEAYVSTASNPITDACALKGIDLINESLVAAYKDGKDKKARTDMCYAEYLAGMAFNNASLGYVHALAHQLGGFYHLPHGVCNAVLLPHVQEANMQCPKAKKRLGEIALHCGASQEDPEETIKALHVLNRTMNIPRNLKDLGVKTEDFDILAEHAMHDACHLTNPVQFTKEQVVAIIKKAYEY

SEQ ID NO: 1115 - protein, 520 aa, Saccharomyces boulardii
  source 1..520: note = CS00018_Aldehyde dehydrogenase 5
MLSRTRAAAPNSRIFTRSLLRLYSQAPLRVPITLPNGFTYEQPTGLFINGEFVASKQKKTFDVINPSNEEKITTVYKAMEDDVDEAVAAAKKAFETKWSIVEPEVRAKALFNLADLVEKHQETLAAIESMDNGKSLFCARGDVALVSKYLRSCGGWADKIYGNVIDTGKNHFTYSIKEPLGVCGQIIPWNFPLLMWSWKIGPALATGNTVVLKPAETTPLSALFASQLCQEAGIPAGVVNILPGSGRVVGERLSAHPDVKKIAFTGSTATGRHIMKVAADTVKKVTLELGGKSPNIVFADADLDKAVKNIAFGIFYNSGEVCCAGSRIYIQDTVYEEVLQKLKDYTESLKVGDPFDEEVFQGAQTSDKQLHKILDYVDVAKSEGARLVTGGARHGSKGYFVKPTVFADVKEDMRIVKEEVFGPIVTVSKFSTVDEVIAMANDSQYGLAAGIHTNDINKAVDVSKRVKAGTVWINTYNNFHQNVPFGGFGQSGIGREMGEAALSNYTQTKSVRIAIDKPIR

SEQ ID NO: 1116 - protein, 635 aa, Saccharomyces boulardii
  source 1..635: note = CS00018_Transaminated amino acid decarboxylase
MAPVTIEKFVNQEERHLVSNRSATIPFGEYIFKRLLSIDTKSVFGVPGDFNLSLLEYLYSPSVESAGLRWVGTCNELNAAYAADGYSRYSNKIGCLITTYGVGELSALNGIAGSFAENVKVLHIVGVAKSIDSRSSNFSDRNLHHLVPQLHDSNFKGPNHKVYHDMVKDRVACSVAYLEDIETACDQVDNVIRDIYKYSKPGYIFVPADFADMSVTCDNLVNVPRISQQDCIVYPSENQLSDIINKITSWIYSSKTPAILGDVLTDRYGVSNFLNKLICKTGIWNFSTVMGKSVIDESNPTYMGQYNGKEGLKQVYEHFELCDLVLHFGVDINEINNGHYTFTYKPNAKIIQFHPNYIRLVDTRQGNEQMFKGINFAPILKELYKRIDVSKLSLQYDSNVTQYTNETMRLEDPTNGQSSIITQVHLQKTMPKFLNPGDVVVCETGSFQFSVRDFAFPSQLKYISQGFFLSIGMALPAALGVGIAMQDHSNAHINGGNVKEDYKPRLILFEGDGAAQMTIQELSTILKCNIPLEVIIWNNNGYTIERAIMGPTRSYNDVMSWKWTKLFEAFGDFDGKYTNSTLIQCPSKLALKLEELKNSNKRSGIELLEVKLGELDFPEQLKCMVEAAALKRNKK

SEQ ID NO: 1117 - protein, 549 aa, Saccharomyces boulardii
  source 1..549: note = CS00018_Amidase
MTVHSTWKEKVQLKKDQLNSKIKDEWKLNSTTITRLKNDKKNLIKNIDDLCSSSENQITHSTIMALRQALEAKELSCHEITAAFCHRAALIHQVVNCLSEIMFSEALRLADYYDSNRPAILPPLYGIPISLKDQCNVEGVDTSLGYLCRTFKPKTKNEESLIVSFLRDLGAIIFVKTTVPSSMMATDTQSNTFGYTYNSINLSFSSGGSSGGEGSLIGAHGSLLGLGTDIGGSIRIPSSYQGLFGLKPTFGRVPYLRVDNSFEGRETIPSVIGPLARDLSDLRYFMSCVINICQPWVQDVKCIPYHFDSSTSKLHDNYVVGIWYGDGVIDPPPSDIRALKTCEDLVNKTKGMKAVKWEPSSELSRELFDLPNEADVADSGNEIKNEFEISGEPLLDILKPMVLENGRPPYTVNEWWDLTKRVYNAQQLMRDYYLSFPESERPDVIISPTTLMPFRPGDMLKTTLRYILLFNVLNFPSLSIPVGSVDCQIDGLMDTTSALNPEDKMIKTYWNDLIQSGEIDGFPIGLQVVSPTFNDNEVCKFASWLFSKI

SEQ ID NO: 1118 - protein, 428 aa, Saccharomyces boulardii
  source 1..428: note = CS00018_Isocitrate dehydrogenase
MSMLSRRLFSTSRLAAFSKIKVKQPVVELDGDEMTRIIWDKIKKKLILPYLDVDLKYYDLSVESRDATSDKITQDAAEAIKKYGVGIKCATITPDEARVKEFNLHKMWKSPNGTIRNILGGTVFREPIVIPRIPRLVPRWEKPIIIGRHAHGDQYKATDTLIPGPGSLELVYKPSDPTTAQPQTLKVYDYKGSGVAMAMYNTDESIEGFAHSSFKLAIDKKLNLFLSTKNTILKKYDGRFKDIFQEVYEAQYKSKFEQLGIHYEHRLIDDMVAQMIKSKGGFIMALKNYDGDVQSDIVAQGFGSLGLMTSILVTPDGKTFESEAAHGTVTRHYRKYQKGEETSTNSIASIFAWSRGLLKRGELDNTPALCKFANILESATLNTVQQDGIMTKDLALACGNNERSAYVTTEEFLDAVEKRLQKEIKSIE

SEQ ID NO: 1119 - protein, 343 aa, Saccharomyces boulardii
  source 1..343: note = CS00018_Malate dehydrogenase
MVKVAILGASGGVGQPLSLLLKLSPYVSELALYDIRAAEGIGKDLSHINTNSSCVGYDKDSIENTLSNAQVVLIPAGVPRKPGLTRDDLFKMNAGIVKSLVTAVGKFAPNARILVISNPVNSLVPIAVETLKKMGKFKPGNVMGVTNLDLVRAETFLVDYLMLKNPKIGQEQDKTTMHRKVTVIGGHSGETIIPIITDKSLVFQLDKQYEHFIHRVQFGGDEIVKAKQGAGSATLSMAFAGAKFAEEVLRSFHNEKPETESLSAFVYLPGLKNGKKAQQLVGDNSIEYFSLPIVLRNGSVVSIDTSVLEKLSPREEQLVNTAVKELRKNIEKGKSFILDSSKL

SEQ ID NO: 1120 - protein, 351 aa, Saccharomyces boulardii
  source 1..351: note = CS00018_Alcohol dehydrogenase
MPSQVIPEKQKAIVFYETDGKLEYKDVTVPEPKPNEILVHVKYSGVCHSDLHAWHGDWPFQLKFPLIGGHEGAGVVVKLGSNVKGWKVGDFAGIKWLNGTCMSCEYCEVGNESQCPYLDGTGFTHDGTFQEYATADAVQAAHIPPNVNLAEVAPILCAGITVYKALKRANVIPGQWVTISGACGGLGSLAIQYALAMGYRVIGIDGGNAKRKLFEQLGGEIFIDFTEEKDIVGAIIKATNGGSHGVINVSVSEAAIEASTRYCRPNGTVVLVGMPAHAYCNSDVFNQVVKSISIVGSCVGNRADTREALDFFARGLIKSPIHLAGLSDVPEIFAKMEKGEIVGRYVVETSK

SEQ ID NO: 1121 - protein, 713 aa, Saccharomyces boulardii
  source 1..713: note = CS00018_Acetyl-coenzyme A synthetase
MSPSAVQSSKLEEQSSEIDKLKAKMSQSASTAQQKKEHEYEHLTSVKIVPQRPISDRLQPAIATHYSPHLDGLQDYQRLHKESIEDPAKFFGSKATQFLNWSKPFDKVFIPDPKTGRPSFQNNAWFLNGQLNACYNCVDRHALKTPNKKAIIFEGDEPGQGYSITYKELLEEVCQVAQVLTYSMGVRKGDTVAVYMPMVPEAIITLLAISRIGAIHSVVFAGFSSNSLRDRINDGDSKVVITTDESNRGGKVIETKRIVDDALRETPGVRHVLVYRKTNNPSVAFHAPRDLDWATEKKKYKTYYPCTPVDSEDPLFLLYTSGSTGAPKGVQHSTAGYLLGALLTMRYTFDTHQEDVFFTAGDIGWITGHTYVVYGPLLYGCATLVFEGTPAYPNYSRYWDIIDEHKVTQFYVAPTALRLLKRAGDSYIENHSLKSLRCLGSVGEPIAAEVWEWYSEKIGKNEIPIVDTYWQTESGSHLVTPLAGGVTPMKPGSASFPFFGIDAVVLDPNTGEELNTSHAEGVLAVKAAWPSFARTIWKNHDRYLDTYLNPYPGYYFTGDGAAKDKDGYIWILGRVDDVVNVSGHRLSTAEIEAAIIEDPIVAECAVVGFNDDLTGQAVAAFVVLKNKSNWSTATDDELQDIKKHLVFTVRKDIGPFAAPKLIILVDDLPKTRSGKIMRRILRKILAGESDQLGDVSTLSNPGIVRHLIDSVKL

SEQ ID NO: 1122 - protein, 177 aa, Holtermanniella takashimae
  source 1..177: note = SBI00120_Succinate dehydrogenase assembly factor 2
MSVRILVSTSRALASGFSGRVFASRAVHSTVQRRKDALFDPYPLPLSPGVVKQQPLSQDSEEWPIPPPLDRTGEDEATLRARLVYQSRKRGTLETDLILATFAREQLPKMSYNELMEFDKLLDEPDWDIFYWAVQKREPPAKWANTRLLQRLIQHAKNEGKVVRIMPALLARGGAPL

SEQ ID NO: 1123 - protein, 536 aa, Holtermanniella takashimae
  source 1..536: note = SBI00120_Malate synthase
MSNGVKLTHPVPAGGDSILTPEALDFLALLHRTFEQTRKDLLEKRKAVQAELDKGKPLTFLPETKSVRDSVSWQCAPPAPGLEDRRVEITGPTDRKMVINALNSGAKTFMADFEDSNSPTWSNMVLGQVNLRDAIRREIDFEVNGKPYKLSEKPAVLLVRPRGWHLTEPHVLIDGQPMSGSIFDFGLYFFHNAAELVKRGFGPYFYLPKMESYLEARLWNDIFTLATSTLRLPQGIIRGTVLIETLPAAFQMDEILYELRNHSSGLNCGRWDYIFSFIKKQRAQKNCVMPDRTDVTMTVPFMEAYVKLLIKTCHKRKVAAMGGMSAQIPIKNDPAANEKVMDKVRADKLREVTAGHDGTWVAHPALVKIAMDVFDDKMKGPNQYHVRREEVEVTDKELANSKVPGKITEIGVRENVSAALSYCAAWISGNGCVPINNLMEDAATAEIARVQLWQWVKYGSKTDSGKTITAAFLQPIFSEEAAKVAKLPGIQSDHVKIASEYMLSQVKAQWPSDFLTTDLQDHLDGSGEEKPKKSGL

SEQ ID NO: 1124 - protein, 454 aa, Holtermanniella takashimae
  source 1..454: note = SBI00120_Tryptophan aminotransferase
MTLNKINADSPDYFLSKRSLKVRMDGIRGLMPLEGPDVVTFVSSHAGRPNPVTFPFNSITLEMKPPLGDSHFPAPDGNKLSDGIVNLKIEGETLEAALQYGPSAGLAPLLKTLTELQETVHGRDRASEGWAISVGSGCQDLMTKAFQACMNFGDSVLLETPMYAGVMPILAELEADMIEVEVDDQGLNAKSLEKIMSEWPANKPRPKIIYSTPVGSNPTGCSAYEERKLAVLELCKKYDLMIFEDDPYYYLATESIPSYFKLEKRVFPNGGRVLRFDSFSKLLSAGMRLGYVTGPARILECIDVNTATANLHTSGVSQAIAARLLQYWGIKGFREHATRVADFYADRREIFEKLAHKYLDGLATWVSPKHSMFCWIEINDIDDTYDLVLKEALAKGVLAVPGQNFYPSGRKSAHIRVSFSVIDLEDGPLNAELGLQRLAEAIRDRRASMGLPAV

SEQ ID NO: 1125 - protein, 668 aa, Holtermanniella takashimae
  source 1..668: note = SBI00120_Acetyl-coenzyme A synthetase
MPDFEPHEGHHLLYDIAERTNGSDKSRPTPHIGPGFEDYQKEWQKTVGGSSDEWWAEMANKHIDWISPFKTVRAGGFEHGDIQWFPEGRLNAAYNCLDRHFYKNPEKTAIIYEADEASDSREISYRELMQETCRLANVLREWGVKKGDAVSVYLPMTWQAVATFLACARVGAVHSAVFAGFSAESLRDRVNDCECKVLITTDEARRGGKTIATKAIVDSALEECPAIEHVLVLQRTGGKVNMKEGRDQWWHEELAKVPAYSPCEPMASEDPLFILYTSGSTGKPKGVVHSTAGYLLGAFLTVKYVFDVHEDDKFACMADVGWITGHTYIVYGPLMNGVTTTVFESTPIYPNASRYWDFVDKWKATHIYTAPTAIRLLRRMGEEFVKDHDLSSLRVLGSVGEPINPEAWHWYNDYVGKGKCAIVDTYWMTETGSIAVTPLPGAIKTKPGAATFPFFGMDVDIIDPTSGKVLEGNEVEGVLAAKAPWPSIARTVFGDHQRYLETYMKPYPGYFFFGDGAARDKDGYIWIKGRVDDVINVSGHRLSTAEVESALILHNGVAETAVVGSHDEISGQAVYAFVTMKPEFDFKQTKEADLLKELSLQVRKVIGPFASPKKIYLVSDIPKTRSGKLMRRILRKIVAGEGDQLGDLSSVADPEVVEMIKTKVAEAK

SEQ ID NO: 1126 - protein, 417 aa, Holtermanniella takashimae
  source 1..417: note = SBI00120_Succinate--CoA ligase subunit beta
MLRGITSARAIARPAKAAVAQRRNLSIHEYQSVQLLNSYGIPTPKALPAFSPSEAEEVAKSFDTSELVIKAQVLAGGRGKGHFDSGFKGGVHMVDSPAEAKEFAGKMIGAKLITKQTGAAGRVCNAIMLAQRMPPQKEYYAAILNDRATSLPVLVTSSQGGMNIEEVAHDTPEAIITTTLDFENGISKEDGVALAKKLGFAADAQENAADVFNKLYTIFKEKDATQIEINPLAELSDGQVLCMDAKFGFDDNADFRQADVFKLRDVTQEDPQEVEAAEYGLNFIKLDGNIGCLVNGAGLAMATMDVLNLHGGSPANFLDVGGGATADAVKKAFELLLSEKKVKSIFVNIFGGIMRCDVIAEGIIKATKELQLTIPLIVRLQGTKEAEAKKMIKESGLKIFPYDGLDEAAAKAVAEAK

SEQ ID NO: 1127 - protein, 334 aa, Holtermanniella takashimae
  source 1..334: note = SBI00120_Succinate--CoA ligase subunit alpha
MLATTLRTSLSAAKSAASTRTFASSAIRASYEDTIKNLLINKDTKVLVQGFTGKTGTFHAQQAIDYGTRMIGGTNPKKAGQTHLGLPVFGSVRDAVKETSPDATVIYVPPPFAADAIIEAIENEIKLIVTITEGIPQRDQIRVMNALKSQSKSRMIGGNCPGIISEGCKMGIMPGHIFSQGKIGVVSRSGTLTYEAVNQTTLAGLGQSLTVGIGGDPFPGTQHIDVVKVLLEDPRTEGIVLIGEIGGSMEEDAAAYLEQYNKTRKVPKPVVAFIAGRTAPPGRRMGHAGAIISGGKGAASDKTAALEKAGAIIADSPAQIGDLMLKAMKDAGLA

SEQ ID NO: 1128 - protein, 504 aa, Holtermanniella takashimae
  source 1..504: note = SBI00120_indole-3-acetaldehyde dehydrogenase
MATYTHEFKTESFNGKVEIPLQLFINNEWVDSSDSSAKTIDVINPTTGEKITSVVEGRESDVDKAVKFATKTFEETWGENVPGFERGKLLIKLATLLERDIEILAAIEALDNGKTYSMAKAFDVAEAAATFRYYGGWADKQHGKVIETSPAKLGFTRHEPIGVVGQIIPWNFPLLMFAWKIAPALATGCTIVIKPSELTPLSALYTCNLIKEAGFPAGCVNVITGYGQTVGNHISSHMDIQKVAFTGSTAVGRKVMEQAAKSNIKNITLELGGKGAAIYFDDSDVDASVRWAAWGIFFNHGQTCCAGSRIFVQRGIYKEFTEKFAEYAKQIKVGDPFAKDTFQGAQVSQTQYDRIMNYVECGKAEGAKCISGGERHGTTGYFIQPTIFMDVEDNMTIAKEEVFGPLVCVTPFDKEEEAIKMANDTVYGLANAVFSQNITRAHRVANKLKSGTVWINCYNQLHPQIPFGGYKQSGIGRELGEYALENYTAVKAVHVNLGGAPPLP

SEQ ID NO: 1129 - protein, 451 aa, Holtermanniella takashimae
  source 1..451: note = SBI00120_Isocitrate dehydrogenase [NADP]
MLRRVSPSSNVVSSLLAQRSVSPIMAASVRSYASTQDGRIQVKNPIVEIDGDEMTRIIWKKIREELILPNVNVDLKYYDLGMENRDATNDQVTIDSAEAIKKYSVGVKCATITPDEARVKEFNLKQMWRSPNGTIRNILGGTVFREPIILEKIPKPVPGWTKPIVIGRHAFGDQYRSTDFLAPGPGKLQLVYTPEGGGEPTTMDVYDFKAKGVALAMYNTEESIYGFAHSSFKMALSKKMTLFMSTKNTILKKYDGRFKDIFEEVYETTYKKEFESLGIYYEHRLIDDMVAQAIKSSGGFVWACKNYDGDVMSDILAQGFGSLGMMTSELITPDGKTMESEAAHGTVTRHYRQYQAGQETSTNPVASIFAWTRGLAFRAKLDDTPELADFANDLEAACVETIDVDGIMTKDLALAMKGKDMGRGDWVTTDEYMKRVEARLKEKMAARKNKA

SEQ ID NO: 1130 - protein, 282 aa, Holtermanniella takashimae
  source 1..282: note = SBI00120_Succinate dehydrogenase iron-sulfur subunit
MLTTTLRRSIASSSKSATATLTAARAFASSAPARLATPADETPSKQSKLKEIKIYRWNPDTPNVKPKLESFKVDLSQCGPMMLDALIKIKNEVDPTLTFRRSCREGICGSCAMNIDGVNTLACLCRIDKDESKASKIYPLPHMYVVKDIVADLTLFYKQYKSVEPFLKNDNPPAQGEFLQSPEDRKKLDGMYECILCACCSTSCPSYWWNQDEYLGPAVLMQAYRWMADSRDSYGAERKEKMQNSLSLYRCHTIFNCSRTCPKGLNPAMAIAKMKLEMATES

SEQ ID NO: 1131 - protein, 639 aa, Holtermanniella takashimae
  source 1..639: note = SBI00120_Probable succinate dehydrogenase flavoprotein
MLRSINRALAKTKSAGIAKNARGLVVPSSSHRAQEAPNFGQHKGYPVIDHEFDAVVVGAGGAGLRAAFGLAEAGFKTACITKLFPTRSHTVAAQGGVNAALGNMTEDDWRWHMYDTVKGSDWLGDQDAIHYMCREAPNSVIELEHFGVPFSRTKEGKIYQRAFGGQSLKYGKGGQAYRCAAAADRTGHAILHTLYGQSLRHDTNFFIEYFALDLLMQDGECVGVIALNMEDGTLHRFRSHKTVLATGGYGRAYFSCTSAHTCSGDGNAMVVRAGLPLQDLEFVQFHPTGIYGAGCLITEGSRGEGGYLLNSQGERFMERYAPTAKDLASRDVVSRSMTLEIREGRGVGPEKDHIYLQLSHLPAEVLHERLPGISETAAIFAGVDVTKEPIPVLPTVHYNMGGIPTKYTGEVLTVDKDGKDQVVPGLYAAGEAACVSVHGANRLGANSLLDIVVFGRACAHHIRDTTTPGKPHKPMKGDLGKESIEELDRIRNSSGELSTAQIRLNMQKTMQTDAAVFRTQKSLDEGVEKMTKVFQSYDNVGIKDRSLIWNSDLIETLELRNIQQNAMQTVVSAAARKESRGAHAREDFPDRDDDKWMKHTLSFQRDPNSAEVELQYREVIGTTLDEAECKAVPPFKRTY

SEQ ID NO: 1132 - protein, 324 aa, Clavispora sp.
  source 1..324: note = SBI00225_Succinate--CoA ligase subunit alpha
MLSKQFARGFASTPVARNYASTIKNLKVNKDTKVIYQGFTGKQATFHAEQAIAYGTKVVGGTNPKKAGQTHLDKPVFASVKDAIRETGANATGIFVPPSIAAAAIEEAIAAEIELAVAITEGIPQKDMVRIAQILKTQSKTRLVGPNCPGLIAPDQCKIGIMPSSIHMRGKVGIISRSGTLTYEAVAQTTKVGLGQSLVIGMGGDPFPGTNFIDALTLYLNDPETEGIILIGEIGGTAEEEASEFLKQYNLTRPEGPKPVVSFIAGVSAPPGRRMGHAGAIVAGGKGDAKSKIAALESAGVVVEQSPARLGNSLLKEFKNKGLL

SEQ ID NO: 1133 - protein, 562 aa, Clavispora sp.
  source 1..562: note = SBI00225_Pyruvate decarboxylase isozyme
MAEITLGRYLFERLNQLSVQTIFGLPGDFNLSLLDKIYEVDGMRWAGNANELNAAYAADGYSRVKGLACLVTTFGVGELSALNGVGGAYAEHVGLLHVVGVPSISSQAKQLLLHHTLGNGDFTVFHRMSNNISQTTAFISDIDSAPKEIDRCIREAYVNQRPVYVGLPANLVDLAVPASLLDTPIDLSLKQNDPDAQAEVIETVLELIDQAQNPVILVDACASRHDCKPEVAALIDSTQYPVFTTPMGKSGVNESHPRFGGVYVGSLSEPSVKEAVESADLILSVGALLSDFNTGSFSYSYKTKNIVEFHSDYTKIRQATFPGVQMKEALNALLKDIGSHTANYTPGPVPAQKVVAAPAATEPINQEWMWSRVSDWFQEGDIIITETGTSAFGIVQSKFPNNCIGISQVLWGSIGFTVGATLGAVMAAQEVDPKKRVILFIGDGSLQLTVQEISTMVKWETTPYLFVLNNDGYTIERLIHGETASYNDIQPWDNLALLPLFKSKDYETTRVSTVGEIESLLNDAAFKENTRIRMVEVMLPRMDAPQNLVKQAEFSAQTNAQN

SEQ ID NO: 1134 - protein, 844 aa, Clavispora sp.
  source 1..844: note = SBI00225_Protein PDC2
MGYTIKQKIEICLKSEANPLMTQTELANWAMKQYGSNKPPSQTTISRILSSKNEIIGSKESDFALVRRRKQSNPVLRKILTEWITQTHWEQIPITTPIIQLTANAIWTRLPKLLIDGNGVFNHKWCNHFVKRLNINLVGSREAVENNLGHPLNKVWRIDEKLELKRYLAGLISRHNYEPKDVFTIDEISLFYALPLDQIFDISSIDKGLKQSQSSTKNMLTVMLGCNIDGSEKLMPLIVSKDESLDASESSHPAFKSHGAAQLSPQALINKICEVYQILLKTNNNKWITSSMFQDYLLTLDHKIENASPNRKIMILLDNSSSHRMINLEFKHIKLVYLENASKHKNSYNGSFNGGKFDFLPMSFGIVEEFKILYRLQQYLEMINKQRNHGDSDSGLPISSSSNLNNLKRSSESDVLSQNEYDVLFMKVIEWIKRSWDSISSQKIFLSWKHTYLISFKHPWPATDARIVQQAQDLFIPLIEAEVSYDAEKSYHKLLEIMKYLNVMIPWNIDELLGLVNERSKVSLDYVSIEEIIGSCVLDKTDEEQKEQEPQTNTITPMSDTWFSGLNTLLPPTGEQRFPLPAVSQLSQKVTSQNPNQLAPISPALQYSNMNRPPQQQQPMALRQPQMPSKYREMPYSDYQIGSPGTTNMNALLLATSVSKNQEAGNSSLNGTNAFSLLLPVKQETLPPVLTRVDMNNPLAAERKRRLSFDTNGFPERKLQSFTSSLGAPYFTGSPLPGGLGTQDSLNTDPINFAGLSFSPVTNNPSMNGLRPQLPDRLREGNSETPLEAQAAADGDPDLISLLNRVIDASGSEGLKLSNFALEELRSNLTKMQGKYDHDKPLPM

SEQ ID NO: 1135 - protein, 385 aa, Clavispora sp.
  source 1..385: note = SBI00225_Alcohol dehydrogenase
MVFLRLLRARAPALARPVRFSPAYARFCSSCPPHPQHGPAIPTTQKAVVFDTHGGPLMYKDIPVPTPKPNELLVNVKYSGVCHTDLHAWKGDWPLPVKLPLVGGHEGAGVVVAMGASVTGWKIGDYAGVKWLNGSCQSCSMCESGHESNCADADLSGYTHDGSFQQYATADAVQAARIPAGADLAAVAPILCAGITVYKALKTAELKPGNWVAVLGAGGGLGTLAVQYAKAMGYMVVAIDGGSDKGQLVRLLGADAFVDFTMEDVTPAVVRATGDGAQAVINVLVSDAAMRQSTQYVRPTGTVVLVGMPAGAHIDMPVFDAVVKSVKIAGLYVGNRADTREALDFFARGLVHAPIQVAGLSELPRIFKEMESGTVMGRYVVDTSC

SEQ ID NO: 1136 - protein, 305 aa, Clavispora sp.
  source 1..305: note = SBI00225_Nitrilase
MAKYTVAALQIGASKEGSLKTVEKVLSYEKELLEKEVKLVVLPEATIGGYPKGSQFGTYLGYRLPEGRKEFVEYFKQSIEVPGPEILQLEGLSKRTGAMIVTGVIERGGSTLYCTMVYIDPKQGYVGKHRKLMPTATERLVWGQGDGSTLYVAESKELGRIGGGICWENYMPLYRAAYYAKGLNIYVAPTVDDREVWASLIKTIAVEGRQFAISSVPFLSWEEHTRDVPGYTREQPINGGSLIVDPYGEVLAGPLIGEEGLLTAEIDLDIILESRYDLDAAGHYTRPDIFKLTVDERARGTVFEK

SEQ ID NO: 1137 - protein, 259 aa, Clavispora sp.
  source 1..259: note = SBI00225_Succinate dehydrogenase iron-sulfur subunit
MFKQMIRPVARISPARTLATASAPRIKKFQIYRWNPDTPEVAPKMQSYDIDLNACGPMILDALLKIKNEQDSTLTFRRSCREGICGSCAMNIGGVNTLACLCKIDSNTAKDTKIYPLPHMYIVRDLVPDLTHFYQQYKSIQPYLQRDDLPTDGRENLQSIEDRAKLDGLYECILCACCSTSCPSYWWNQQQYLGPAVLMQAYRWLIDSRDQASKVRKEMLQNSMSLYRCHTIMNCSRTCPKGLNPGRAIAEIKKQLAFD

SEQ ID NO: 1138 - protein, 348 aa, Clavispora sp.
  source 1..348: note = SBI00225_Alcohol dehydrogenase
MSIPKTQKAVVFETNGGPLEYKEIPVPTPKDNELLINVKYSGVCHTDLHAWKGDWPLDTKLPLVGGHEGAGVVVALGSNVKGWKIGDYAGIKWLNGSCLQCEFCQQGNESNCPEADLSGYTHDGSFQEYATADAVQAAKIPQGTDLSLIAPILCAGITVYKALKTAKLQAGQWVCISGAGGGLGSLAIQYAKAMGYRVVGIDGGDDKKAFCESLGAEAFVDFTKSKDIVADVKAATNGGPHGAINVSVSEKAISQSVDYIRSTGTVVLVGLPAGAQVVAPVFDAVVKSVSICGSYVGNRADSAEAIDFFSRGLITCPIKVVGLSTLPEVFKLMEEGKILGRYVVDTTK

SEQ ID NO: 1139 - protein, 413 aa, Clavispora sp.
  source 1..413: note = SBI00225_Succinate--CoA ligase subunit beta
MFSRVARASRVCNKRFLSLHEYRSAALLESYGVGVPKGYAATTPEGAFEAAKKLGTNELVIKAQALTGGRGKGHFDNGFQGGVKLISSPEEAKDLAEKMLNHKLITKQTGAAGKEVTAVYVVERRDARTEAYLAILLDRSTQLPMIVASAQGGMDIEGVAAENPDAIKTFSVSLEEGVTDKLAVEIASVLGYTDAAIPEAAKAVQNLYRVFEEKDCTQVEINPLSETPDHKVLAMDAKLGFDDNASFRQEEVFGWRDPTQEDPQESEAGKYGLNFIKLDGNIANIVNGAGLAMATMDIIKLYGGEPANFLDCGGTATPETIEKAFELILSDKKVNGIFVNIFGGIVRCDYVAEGLIAATKNFNLDIPVVVRLQGTNMEKAKELIDNSGLKLFAFEDLDPAAEKIVQLAPKPTV

SEQ ID NO: 1140 - protein, 613 aa, Clavispora sp.
  source 1..613: note = SBI00225_Probable succinate dehydrogenase flavoprotein
MLRSIRNFSTSRVAKQVIGAAKGESVNSTKYLGQKYHVIDHEYDCVVVGAGGAGLRAAFGLAEAGFKTACVTKLFPTRSHTVAAQGGINAALGNMHKDDWHWHMYDTVKGSDWLGDQDAIHYMTKEAPESIYELENYGVPFSRNEEGRIYQRAFGGQSKEYGKGGQAYRTCAVADRTGHALLHSLYGQSLRHDTHFFIEFFATDLMMENGECVGVMAYNQEDGTLHRFRAHKTVLATGGYGRAYFSCTSAHTCTGDGYAMASRAGLPLQDLEFVQFHPSGIYGSGCLITEGARGEGGYLINSEGERFMERYAPSAKDLASRDVVSRAITMEINEGRGVGPEKDHMFLQLSHIPAAVLKERLPGISETAHIFAGVDVTKEPIPILPTVHYNMGGIPTKWTGEVVKKNEKGEDEVVPGLLACGEVACASVHGANRLGANSLLDLVVFGRAPVSKDIGLESIANLDKLRNANGTKSTADIRLAMQKTMQKGCAVFRTQETLDECVENINAVDETFAHVKTTDRSMIWNSDLVETLELQNLLTCATQTAASAAARPESRGAHARDDYPDRNDVDWMKHTLSYQESFGAPVTLDYRKVINTTLDENDCKPVPPAKRVY

SEQ ID NO: 1141 - protein, 561 aa, Clavispora sp.
  source 1..561: note = SBI00225_Probable succinate dehydrogenase flavoprotein
MLRSIRNFSTSRVAKQVIGAAKGESVNSTKYLGQKYHVIDHEYDCVVVGAGGAGLRAAFGLAEAGFKTACVTKLFPTRSHTVAAQGGINAALGNMHKDDWHWHMYDTVKGSDWLGDQDAIHYMTKEAPESIYELENYGVPFSRNEEGRIYQRAFGGQSKEYGKGGQAYRTCAVADRTGHALLHSLYGQSLRHDTHFFIEFFATDLMMENGECVGVMAYNQEDGTLHRFRAHKTVLATGGYGRAYFSCTSAHTCTGDGYAMASRAGLPLQDLEFVQFHPSGIYGSGCLITEGARGEGGYLINSEGERFMERYAPSAKDLASRDVVSRAITMEINEGRGVGPEKDHMFLQLSHIPAAVLKERLPGISETAHIFAGVDVTKEPIPILPTVHYNMGGIPTKWTGEVVKKNEKGEDEVVPGLLACGEVACASVHGANRLGANSLLDLVVFGRAPVSKDIGLESIANLDKLRNANGTKSTADIRLAMQKTMQKGCAVFRTQETLDECVENINAVDETFAHVKTTDRSMIWNSDLVETLELQNLLTCATQTAASAAARPESRETMWTG

SEQ ID NO: 1142 - protein, 672 aa, Clavispora sp.
  source 1..672: note = SBI00225_Acetyl-coenzyme A synthetase
MPEHLVMDHEGAKNPPQGFFERTTHTPHLASLDEYHTLHKQSVEDPASFFGDMARKHLSWSRPFDTARYPADPKNDFADGDLPAWFLGGQLNACYNAVDRWAVENPNKPAIIYEGDEPNTGRIISYGELLKDVCKLAQALVKAGVKKGDTVAVYLPMIPEALVTLLAIVRIGAVHSVVFAGFSLTSLRDRIVDGDSRVVITADESKRGGKTIETKKIVDEALKDLPQVRNVFVFKRTGNSHVPFNPARDLWWHEELAKYGNYFPPVAVDAEDPLFLLYTSGSTGKPKGVQHNVAGYLLGALLTTKYTFDVHRDDIVFTAGDIGWITGHTYVVYGPLLNGATTVVFEGTPAYPDYSRYWQIVDEYKVNQFYVAPTALRLLKRAGTSYIEKYKLDSLRVLGSVGEPIAAEVWHWYNDNIGRGKAHIVDTYWQTESGSHLLTPLAGLTPTKPGSASFPFFGIDAHVLDPVTGEILTEDGVEGVLAIKNAWPSIARGIFNDYSRFIDTYLGNYKGYYFTGDGAARDRDGFYWILGRVDDVVNVSGHRLSTAEIEAALIEHKMVGESAVVGYADELTGQAVAAYVSLKSQYKSGDKESIEAIKKELILTVRKEIGPFAAPKQILLVDDLPKTRSGKIMRRILRKVLAGEEDQLGDTLTLSDPSVVQQIIDVVKETRK

SEQ ID NO: 1143 - protein, 348 aa, Clavispora sp.
  source 1..348: note = SBI00225_Alcohol dehydrogenase
MSIPTTQKAVIFETNGGPLEYRDIPVPTPKPNELLINVKYSGVCHTDLHAWKGDWPLDTKLPLVGGHEGAGVVVALGSNVKGWKIGDYAGIKWLNSSCNSCEFCQNTNESNCPDAVLSGYTHDGSFQQYATADAIHAARIPQGTDLALVSPILCAGITVYKALKTANLKAGEWVAISGAAGGLGSLAIQYAKAMGYRVIAIDGGEDKGEFVKSLGAEAYVDFTKSKDVVADVQKVTDGGPKGVINVSVSEHAIGQSVAYVRSTGTVVLVGLPAGAKVTAPVFDAVVKSISIRGSYVGNRADSAEAIEFFTRGLITCPIKIVGLSELPSVYKLMEEGKILGRYVVDTSK

SEQ ID NO: 1144 - protein, 542 aa, Clavispora sp.
  source 1..542: note = SBI00225_Malate synthase
MSSPFPTTALKVQGVQILGPIPPNAKHIYSAEALALVATLHRNFQPQRKKLLAARKEQQQLRDSGVLPDFLPETAYIRDDPTWTGPPIGSGLTRPPKMVINALNSGVATYMADFEDSLTPAWDNLVDGQVNLYDAVRRDISYSANGKHYKLNLDPGRHIPTLIVRPRGWHLDERHVLVDGEAVSGGIFDFAIYFFNNAKESLARGAGPYFYLPKMEHHLEAKLWNDVFNHAQDYVGIPRGTIRGSVLIETLPAAFQMDEIIYQLRQHIGGLNCGRWDYIFSYIKSLRNHKEFILPDRSQVTMAAPFISSYVRLLVHTCHKRQVHALGGMAAQIPIKEDEARNRAALENVAKDKLREVMAGCDSCWVAHPALVPVVLKVFNEHMKGPNQINVPPRVPYKPVTARDLLSPFVPGAKITEQGIRANCVIGLSYIEAWLRNVGCVPINYLMEDAATAEVSRTQLWQWVTHGASTDAGQRIDKAYVSKLLNEEYQKLASAAKPGNKFKRALEYFKPEALGEKYSDFVTTLIYDEVTTVGRPILAEKL

SEQ ID NO: 1145 - protein, 675 aa, Clavispora sp.
  source 1..675: note = SBI00225_Acetyl-coenzyme A synthetase
MSHAVVHEANGVAPRHTPAEFFTKQPAKGHISSLEQYQQMYDQSINDPEAFFGPLAKELLHWDKPFTTVKAGDLNNGDVQWFVGGELNASYNCVDRWAYAHPEKLALIYEADDEKDSYSLTYGELLREVSATAGVLKSWGIGKGDNVAIYLPMNAQAIIAMLAVARLGAVHSVIFAGFSSGSIRDRVIDAQCKALITCDEGKRGGKTINIKKLCDEALLSCPSVEKVLVHRRTGNPDIAVTEGRDFWWDEEAAKFPGYLPPTPVNAEDPLFLLYTSGSTGSPKGVVHTTGGYLLGAALTTKYVFDVHALDVVFTAGDVGWITGHTYALYGPLLLGVPTVVFEGTPAYPDYGRLFQIVDKHKATHFYIAPTALRLLRKAGEQEIEKYDLSSLRTLGSVGEPISPDIWEWYNEKIGRGRCHISDTYWQTESGSHFIAPLAGITPNKPGSASLPFFGVDTRLIDPVSGKEIVGNDVEGVLAIKSTWPSMARTVYRNHQKYMDTYLKPYPGYYFTGDGAARDNDGYYWIRGRVDDVVNVSGHRLSTAEIEAALLEHHGVSESAVVGINDDLTGQAVVAFVALKDEFAASINGKETSEEAFVLRRDLVLVVRKEIGPFAAPKSVIIVQDLPKTRSGKIMRRILRKISSLEADQLGDISTLANPQSVAGIIDSFDAQFGKK

SEQ ID NO: 1146 - protein, 410 aa, Clavispora sp.
  source 1..410: note = SBI00225_Isocitrate dehydrogenase
MSQKITVKNPIVEMDGDEMTRIIWKFIKDKLIFPYLEIDLKYYDLGIEYRDETDDKVTTDAANAILKYGVGVKCATITPDEARVVEFGLKKMWLSPNGTLRNILGGTVFREPIVIDNIPRIVPSWEKPIIIGRHAFGDQYKATDLVIPKAGNLSLVFKPEDGSDEQVFAVYDYKGPGVALSMYNTDKSITDFAESSFRLALTRKMNLFSTTKNTILKKYDGRFKDIFESLYENKYKKDFDAAGIWYEHRLIDDMVAQMLKSKGGYIIAMKNYDGDVQSDIVAQGFGSLGLMTSVLVTPDGKAFEAEAAHGTVTRHYRQHQQGKETSTNSIASIFAWTRGLIQRGTLDGTEDVVKFGQNLEKAVIDTVALDSVMTKDLALTQGKTDRSSYVTTEEFIDAVQKRLNKNLAKS

SEQ ID NO: 1147 - protein, 627 aa, Clavispora sp.
  source 1..627: note = SBI00225_NAD-dependent malic enzyme
MMLVGKNRTSTLRNIRAVRFVSDATVQAHTIKTPVGVKAAIAALKPKTTRLSIEGPIECDLQGFQLLNSPIFNKGSAFTQEERKAFNLSGLLPSKVNNLQEQVDRAYAQFQYLKTPLAKNDFLTSMRIQNKVLYYELVRNHIREMLPIIYTPTEGDAIAAYSHRFRKPEGCFLDITAPEEIEERLAAYGEDKDIDYIVLSDGEGILGIGDQGVGGIRIAIAKLGLMTLCAGIHPGRVLPVVFDVGTNNKELQEDDLYMGNKFERVRGEQYWSFVDKFIQSVKKRFPLAVLHYEDFGVSTGRTMLHRYRSDLPSFNDDIQGTGAVVMASMTAALQFSRRDLLETQVLIYGAGSAGLGVADQIVNHMVSHGLTVEDACKRITIMDRRGVVLQSYPNSPEGQLRYADPDAKWDGVNTKNLQEVVAKVKPTVLVGCSTQAGAFTEQVIKEMYKHNPQPIVFPLLNPTRLHEAFPVDIMRWTDNNALIATGSPFQPVDGYYISENNNCFTFPGIGLGAVLSRCTTITDTMISAAVDQLALMSPKMANPKNGLLPRLEEISHVSAHVATAVILQSLKEGTARVESEEKPDGGSVEVPRDFDKCLKWVQSQMWKPVYRPLVKVSHTPEIHTFQY

SEQ ID NO: 1148 - protein, 428 aa, Clavispora sp.
  source 1..428: note = SBI00225_Isocitrate dehydrogenase
MLRSTIKQTQSARLFSAASAASGKIKVTNPIVELDGDEMTRIIWARIKDKLINPYLDVDLKYYDLGIQARDKTDDQITVDAANAIKEYGVGVKCATITPDEDRVAEFGLKKMWLSPNGTIRNILGGTVFRESIIIPRIPRLVPGWEKPIVIGRHAHGDQYKATDLVIEEPGKLEMVFTPANGGEKVTRTIYDYKNRGVGLAMYNTDESITGFAHSSFKMALSQNLPLYLSTKNTILKKYDGRFKDIFQEIYEKEYAGQFEKQGLWYEHRLIDDMVAQMIKSKGGFVMALKNYDGDVQSDIVAQGFGSLGLMTSALMTPDGKAYESEAAHGTVTRHYRQHQQGKETSTNSIASIFAWSRGIAQRGRLDGTADVVDFANTLEHATVATVQEDGIMTKDLALACGKTNRESYVTTTEFLDAVSDKLKSLKA

SEQ ID NO: 1149 - protein, 518 aa, Clavispora sp.
  source 1..518: note = SBI00225_Aldehyde dehydrogenase 5
MIRTTFTKTAIRKAWSPSLIRLYSNLPLSVTVNLPNGTSYEQPTGLFINGKFVLPQQKKTFEVISPSTEEEVTHVYEAREEDVDVAVKAAQAAFEGGWSTADPAVRAAALNKLADLLEANAETLAAIESLDNGKSISNARGDVALSIGCLRSTAGWADKILGTVVETGDSHFNFTRREPLGVCGQIIPWNFPLLMFAWKVAPAIATNNTIVLKTSETTPLSALFVCKLIEENNVLPPGVLNVVNGFGKITGNAITDHPTIKKVAFTGSTATGKHIMAKCANTLKKITLELGGKSPHIIFNDADLDVAVQNVVTGIFYNSGEVCCAGSRLYVQEDIYDQFVEKFVTAAKNVKVGNPFDEEVLQGAQNSWNQLSKILGFIESGKKEGATLLTGGKRAGDKGFFVEPTVFGDVTEDMTIVKEEIFGPVITVHKFKTVDDAVKLANNSQYGLAAGIQSTNVNTCIDVARRVKAGTVWVNTYNDFHQMVPFGGFGASGVGREMGKEVLENYTQTKAVRMAIHK

SEQ ID NO: 1150 - protein, 558 aa, Clavispora sp.
  source 1..558: note = SBI00225_Malate synthase 1
MVFSSLDNVAVLAPVEFAAKHESGTTQADILTRSALSFVVMLHRAFNSTRKHLLANRQKVQAEIDAGQPLDFVRDAHWEKIRADPVWRGAAPGPGLADRRSEITGPPERKMVVNALNTPVRTYMCDFEDSLAPTWASVVDGQVNLYDAVRNQIDFIFAATGKSYAVNRAPGRHIPTLIVRPRGWHMVDKHVVVDGEPVSASLLDFGLYFFHNARALVAAGRGPYFYLPKMEHHLEAKLWNDVFNVAQDALTIPRGTIRATVLIETLPAAYQMEEIIYQLRDHSAGLNCGRWDYIFSTIKRLRNHKDKVLPNRGLVTMKLPFMEAYCKRLINVCHRRQVHAMGGMAAQIPIKDDAAANAAAMAKVKADKLREATMHYDGTWVAHPALAPIANGVFDEHMPTPNQIHIVPEENVAAEDLSNTAIAGFEVTTAGIRENLYIALCYMELWIRGVGCVPINNLMEDAATAEVSRLQLYLWVKHGVTLADTNEVVTPDLAQALLEDETAKLKQKYASVPHKFDVAQKYLLPEIRGDSLTEFLTTLVYDEVVTAGEPVDLSALHE

SEQ ID NO: 1151 - protein, 333 aa, Clavispora sp.
  source 1..333: note = SBI00225_Malate dehydrogenase
MVKVTVCGAAGGIGQPLSLLLKLNPQVTELSLFDVVNVPGVGADLSHINSGATTQSFLPSSREDTTALAASLKGSDLVVIPAGVPRKPGMTRDDLFNINASIVQSLAKGIAENAPDAFVLVISNPVNSTVPIVAETLKQYKVFNPSKLFGVTTLDIVRANTFVSQLFPDETKPTDFEVPVVGGHSGETIVPLYSLGAPEYYAKLSEEKKKELVHRVQFGGDEVVQAKNGAGSATLSMAYAGYRLAESLLKALSGSAVTECTFLYLDESIKGAAEAKKLVNVDFFSLPATLGQTGITAVDYSVLEKANADEKKLLEVAIEQLSKNIEKGVSFGK

SEQ ID NO: 1152 - protein, 321 aa, Clavispora sp.
  source 1..321: note = SBI00225_Malate dehydrogenase
MFKAATRSFSSSPSAAYKVAVLGAGGGIGQPLSLLMKLNQKVTDLALYDLRGAPRCCCRRGYEPEQLDEALKGADVVVIPAGVPRKPGMTRDDLFNTNASIVRDLAKAVAENAPNAAVCIISNPVNSTVPIVAEVFKSKGVYNPKKLFGVTTLDVLRASRFVSEIAGTNPSHEHVTVVGGHSGITIVPLLSQTTHKDLPVETRDALIHRIQFGGDEVVQAKNGAGSATLSMAQAGARFAGAVLNGLAGEKDIVEPSFVDSPLFKDEGVEFFSSKVTLGVEGVKTIHSLGELSDHEEELVKKAKETLITNIKKGVEFVAQNP

SEQ ID NO: 1153 - protein, 331 aa, Clavispora sp.
  source 1..331: note = SBI00264_Malate dehydrogenase
MFKAATRSFSSSPSAAYKVAVLGAGGGIGQPLSLLMKLNQKVTDLALYDLRGAPGVAADVSHVPTNSTVKGYEPEQLDEALKGADVVVIPAGVPRKPGMTRDDLFNTNASIVRDLAKAVAENAPNAAVCIISNPVNSTVPIVAEVFKSKGVYNPKKLFGVTTLDVLRASRFVSEIAGTNPSHEHVTVVGGHSGITIVPLLSQTTHKDLPVETRDALIHRIQFGGDEVVQAKNGAGSATLSMAQAGARFAGAVLNGLAGEKDIVEPSFVDSPLFKDEGVEFFSSKVTLGVEGVKTIHSLGELSDHEEELVKKAKETLITNIKKGVEFVAQNP

SEQ ID NO: 1154 - protein, 333 aa, Clavispora sp.; identical to SEQ ID NO: 1151
  source 1..333: note = SBI00264_Malate dehydrogenase

SEQ ID NO: 1155 - protein, 558 aa, Clavispora sp.; identical to SEQ ID NO: 1150
  source 1..558: note = SBI00264_Malate synthase

SEQ ID NO: 1156 - protein, 551 aa, Clavispora sp.
  source 1..551: note = SBI00264_Malate synthase
MSSPFPTTALKVQGVQILGPIPPNAKHIYSAEALALVATLHRNFQPQRKKLLAARKEQQQLRDSGVLPDFLPETAYIRDDPTWTGPPLAPGLRDRRVEITGPTDRKMVINALNSGVATYMADFEDSLTPAWDNLVDGQVNLYDAVRRDISYSANGKHYKLNLDPGRHIPTLIVRPRGWHLDERHVLVDGEAVSGGIFDFAIYFFNNAKESLARGAGPYFYLPKMEHHLEAKLWNDVFNHAQDYVGIPRGTIRGSVLIETLPAAFQMDEIIYQLRQHIGGLNCGRWDYIFSYIKSLRNHKEFILPDRSQVTMAAPFISSYVRLLVHTCHKRQVHALGGMAAQIPIKEDEARNRAALENVAKDKLREVMAGCDSCWVAHPALVPVVLKVFNEHMKGPNQINVPPRVPYKPVTARDLLSPFVPGAKITEQGIRANCVIGLSYIEAWLRNVGCVPINYLMEDAATAEVSRTQLWQWVTHGASTDAGQRIDKAYVSKLLNEEYQKLASAAKPGNKFKRALEYFKPEALGEKYSDFVTTLIYDEVTTVGRPILAEKL

SEQ ID NO: 1157 - protein, 716 aa, Clavispora sp.
  source 1..716: note = SBI00264_NAD-dependent malic enzyme
MSLSNPGSATKHRHPAAAICRCHPAAAAIPPLPSRRRHYAATICRRHPAAAAPPPKSLFLRWVYPPDTVTAYSGYIYHPPPRSGYAPPKMMLVGKNRTSTLRNIRAVRFVSDATVQAHTIKTPVGVKAAIAALKPKTTRLSIEGPIECDLQGFQLLNSPIFNKGSAFTQEERKAFNLSGLLPSKVNNLQEQVDRAYAQFQYLKTPLAKNDFLTSMRIQNKVLYYELVRNHIREMLPIIYTPTEGDAIAAYSHRFRKPEGCFLDITAPEEIEERLAAYGEDKDIDYIVLSDGEGILGIGDQGVGGIRIAIAKLGLMTLCAGIHPGRVLPVVFDVGTNNKELQEDDLYMGNKFERVRGEQYWSFVDKFIQSVKKRFPLAVLHYEDFGVSTGRTMLHRYRSDLPSFNDDIQGTGAVVMASMTAALQFSRRDLLETQVLIYGAGSAGLGVADQIVNHMVSHGLTVEDACKRITIMDRRGVVLQSYPNSPEGQLRYADPDAKWDGVNTKNLQEVVAKVKPTVLVGCSTQAGAFTEQVIKEMYKHNPQPIVFPLLNPTRLHEAFPVDIMRWTDNNALIATGSPFQPVDGYYISENNNCFTFPGIGLGAVLSRCTTITDTMISAAVDQLALMSPKMANPKNGLLPRLEEISHVSAHVATAVILQSLKEGTARVESEEKPDGGSVEVPRDFDKCLKWVQSQMWKPVYRPLVKVSHTPEIHTFQY

SEQ ID NO: 1158 - protein, 428 aa, Clavispora sp.; identical to SEQ ID NO: 1148
  source 1..428: note = SBI00264_Isocitrate dehydrogenase

SEQ ID NO: 1159 - protein, 410 aa, Clavispora sp.; identical to SEQ ID NO: 1146
  source 1..410: note = SBI00264_Isocitrate dehydrogenase

SEQ ID NO: 1160 - protein, 518 aa, Clavispora sp.; identical to SEQ ID NO: 1149
  source 1..518: note = SBI00264_Alcohol dehydrogenase

SEQ ID NO: 1161 - protein, 348 aa, Clavispora sp.; identical to SEQ ID NO: 1143
  source 1..348: note = SBI00264_Alcohol dehydrogenase

SEQ ID NO: 1162 - protein, 413 aa, Clavispora sp.; identical to SEQ ID NO: 1139
  source 1..413: note = SBI00264_Succinate--CoA ligase [ADP-forming] subunit beta

SEQ ID NO: 1163 - protein, 324 aa, Clavispora sp.; identical to SEQ ID NO: 1132
  source 1..324: note = SBI00264_Succinate--CoA ligase [ADP-forming] subunit alpha

SEQ ID NO: 1164 - protein, 672 aa, Clavispora sp.; identical to SEQ ID NO: 1142
  source 1..672: note = SBI00264_Acetyl-coenzyme A synthetase 1

SEQ ID NO: 1165 - protein, 675 aa, Clavispora sp.; identical to SEQ ID NO: 1145
  source 1..675: note = SBI00264_Acetyl-coenzyme A synthetase 2

SEQ ID NO: 1166 - protein, 562 aa, Clavispora sp.; identical to SEQ ID NO: 1133
  source 1..562: note = SBI00264_Pyruvate decarboxylase isozyme 3

SEQ ID NO: 1167 - protein, 629 aa, Clavispora sp.
  source 1..629: note = SBI00264_Succinate dehydrogenase
MLRSIRNFSTSRVAKQVIGAAKGESVNSTKYLGQKYHVIDHEYDCVVVGAGGAGLRAAFGLAEAGFKTACVTKLFPTRSHTVAAQGGINAALGNMHKDDWHWHMYDTVKGSDWLGDQDAIHYMTKEAPESIYELENYGVPFSRNEEGRIYQRAFGGQSKEYGKGGQAYRTCAVADRTGHALLHSLYGQSLRHDTHFFIEFFATDLMMENGECVGVMAYNQEDGTLHRFRAHKTVLATGGYGRAYFSCTSAHTCTGDGYAMASRAGLPLQDLEFVQFHPSGIYGSGCLITEGARGEGGYLINSEGERFMERYAPSAKDLASRDVVSRAITMEINEGRGVGPEKDHMFLQLSHIPAAVLKERLPGISETAHIFAGVDVTKEPIPILPTVHYNMGGIPTKWTGEVVKKNEKGEDEVVPGLLACGEVACASVHGANRLGANSLLDLVVFGRAVSHTIRDSLTPGTPLKPVSKDIGLESIANLDKLRNANGTKSTADIRLAMQKTMQKGCAVFRTQETLDECVENINAVDETFAHVKTTDRSMIWNSDLVETLELQNLLTCATQTAASAAARPESRGAHARDDYPDRNDVDWMKHTLSYQESFGAPVTLDYRKVINTTLDENDCKPVPPAKRVY

SEQ ID NO: 1168 - protein, 844 aa, Clavispora sp.; identical to SEQ ID NO: 1134
  source 1..844: note = SBI00264_Pyruvate decarboxylase

SEQ ID NO: 1169 - protein, 305 aa, Clavispora sp.; identical to SEQ ID NO: 1136
  source 1..305: note = SBI00264_Nitrilase

SEQ ID NO: 1170 - protein, 1886 aa, Clavispora sp.
  source 1..1886: note = SBI00264_1,3-beta-D-glucan synthase
MSYDNNHNYYDPNQQHGAAEGEGYYQQGPYDETGQAQYQQGGEFYDPNQQYQQQPYDMEGYQNYGQQGAAGYNADPEAFSDFSYGGQNPGASGYDQYGTQYTPSQMSYGGARSSGASTPIYGANPNYDPTQFQLSSNLPYPAWSADPQAPIKVEHIEDVFIDLTNKFGFQRDSMRNMFDYFMTLLDSRASRMSPAQALLSLHADYIGGDNANYRKWFFASQQDLDESIGFANMKMGKIGRKARKASKKSKKARKAVEEHGEDMDALANDLEGDYSLDAAEIKWKAKMNVLTPEERVRDIALYLLLWGEANQVRFTPECLCYIYKTAMDYLLSPQCQQRQEPVPEGDYLNRTITPIYRFLRSQVYEIYDGRFVKREKDHNKVIGYDDVNQLFWYPEGISRIILLDGTRLIDIPQEERYLRMGEVEWTNVFFKTYKEIRTWLHFVTNFNRIWVIHVVMYWFYTSYNSPTLYTKHYVQTLNNQPTASSKWAAPAIGGIIASFIQICATLFEWMFVPREWAGAQHLTRRMVFLGLIFLLNLVPVVYTFYWAGLQSISKSAHVVSIVGFFIAVATMIFFAVMPLGGLFTSYMQKKSRRYMASQTFTANFYKLKGLDMWMSYLLWTTVFAAKFSESYFFLTLSLRDPIRNLSTMTMRCNGEYWFGDKLCKQQSKIVLGLMILVDLLLFFLDTYMWYILCNCVFSIGRSFYLGISILTPWRNIFTRLPKRIYSKILATTEMEIKYKPKVLISQVWNAIVISMYREHLLAIDHVQKLLYHQVPSEIEGKRTLRAPTFFVSQDDNNFDTEFFPRNSEAERRISFFAQSLATPILEPLPVDNMPTFTVFTPHYSEKVLLSLREIIREDDQFSRVTLLEYLKQLHPVEWECFVKDTKILAEETAAFENGDEEERQDENGLKSKIDDLPFYCIGFKSAAPEYTLRTRIWASLRSQTLYRTVSGFMNYARAIKLLYRVENPELVQYFGGDPEGLEMALEKMARRKFKFVVSMQRMTKFKEDEMENAEFLLRAYPDLQIAYLDEEPPLNEEEEPRVYSAVIDGHCEVLENGRRRPKFRIQLSGNPILGDGKSDNQNHAIIFHRGEYIQLIDANQDNYLEECLKIRSVLAEFEELNVEHVNPYAPNLRNSKEEKEAPVAILGAREYIFSENSGVLGDVAAGKEQTFGTLFARTLAQIGGKLHYGHPDFLNATFMFTRGGVSKAQKGLHLNEDIYAGMTAMLRGGRIKHCEYYQCGKGRDMGFGSICNFTTKIGAGMGEQMLSREYYYLSTQLPLDRFLSFYYGHPGFHINNLFIQLSLQSFMLVLANLNALAHEAILCEYNKNVPVTDVLKPYGCYNLDPAVDWIRRYTLSIFIVFFISFIPLTVQELIERGLWKATQRFCRHFVSLSPLFEVFLAQIYSTSLFIDLTVGGARYISTGRGFATSRIPYSILFSRFADSSIYMGGRSMLIILFGSVSHWQAPLLWFWASLSALIISPFLFNPHQFAWEDFFIDYRDFIRWMSRGNSKWHRNSWIGYVKLSRSRITGFKRKLTGDISEKSAGDTSRAHRSNVLFSDFFPCVFYTAALFVAYTYINAQTGVTKWEVAGRDSTEPIQVNSVARIVICALGPVVINMGCLAVCVGLACCAGPMLGLCCKKTGAVIAGVAHGVAVVVHLVFFIVLWVLEGFDFARMLLGLITAIYIERSLFKLMTLLFLTREFKNDKSNTAFWTGKWYGSGMGWMAFTQPSREFCAKTIEMSEFAGDFILAHIILFIQLPILLIPMIDRWHSTMLFWLKPSRLIRPPIYSLKQAKLRKRMVRKYCTLYFGILILFVIVIAAPAIASRFIKKNLGTTLTGTFAGIFQPRGTKHNDTGKVSSWWSTDGAKITFWSFTPSDSHPYTTKPF

SEQ ID NO: 1171 - protein, 630 aa, Clavispora sp.
  source 1..630: note = SBI00264_Beta-glucan synthesis-associated protein KRE6
MAYRNLTLNQNRLDYNLDEPSDPFDDGSYGSSTEISTENLLRPNHPQSEYDTPNAPTPPPHQSSIVASTEFDRYPLIGASRDVLSASLSSQFPNSGNGLLSSSLNQNDPFAGGMDMSPFGGYPASQFPLHIDEKEDDDHLHNPDPLADAEYDKNRFLYDLKHMDLRSLYGLAGFVVLFIIAAVVFVVLPVLTYSGVTSHGPTTIDSYEVLTQYHYPLSGAIRTSLIDPDTPEEDYFRQTVSGENWTLTFSDEFNAEGRTFYEGDDQFFQAMDLNYAATKDLEWYDPDAVTTVNGTLQLTMDAYKNHNLYYRSGMVQSWNRLCFTQGMIVASANLPNYGNVSGLWPGLWTMGNLGRPGFLATTEGVWPYTYDSCDAGITANQSSPDGISYLPGQRLNACTCKGEDHPNRGTGRGAPEIDILEGATDTDLKVGVASQSYQVAPMDVWYMPDYNFIEVHNLQVTTMNTYAGGPFQQAVSGVTTLNTLWNEHGTNAGQYQEFGFEYLNDDSTGYITWYVGQDPTFTVHAYALGPNGNVGFRRISKEPMSIILNLGISNSWAYIDWAAIHFPSHMRINYVRVYQPPDAISMTCDPADYPTYDYINGHAEAYQNINKTSWELAGYSFPRNKIVNNC

SEQ ID NO: 1172 - protein, 323 aa, Clavispora sp.
  source 1..323: note = SBI00264_Ribose-phosphate diphosphokinase
MHSPANSIRVISGNSHRKLAELIATRLAIPVSKVGAFQYSNKETAVAVGESVRDDDVYITQTGFGENDINDYLMELLLLINACRVGGARRITAVIPNFFYARQDKKDKSRAPITAKLIANLLQTSGCDHVITLDLHASQIQGFFRVPVDNLYAEPSALRFITENYATDLLTIVSPDAGGAKRVAYIADKLDVPFALIHKERQKANEVSKMVLVGDVSNKLCLLIDDIADTCGTLCKAADVLLSNGAQKVVAIVTHGIFSSNAIEKLNKSNLDKIVCTNSLPLDEKLAACPKLELLDISPTLAEAIRRLHNGESVSYLFDNVPE

SEQ ID NO: 1173 - protein, 320 aa, Clavispora sp.
  source 1..320: note = SBI00264_Ribose-phosphate diphosphokinase
MSTNSIKLLASDVHKGLAELVAQRLGLKLTPSELKRDSSGEVTFSIGESVRDEDIFIICQIGSGIVNDRVIELLIMINACRTASARRITVILPNFPYARQDRKDKSRAPITAKLMADMLTTAGCNHVITMDLHASQIQGFFDVPVDNLYAEPSVVRYIREKVSYKDAIIISPDAGGAKRAAGLADRLDLNFALIHKERARANEVSRMVLVGDVTDKICIIVDDMADTCGTLAKAAEVLLENRAKEVIAIVTHGILSGNAIKNINNSKLKAIVCTNTVPFEEKLSLCPKLDTIDISAVLAEAVRRLHNGESISYLFKNAPL

SEQ ID NO: 1174 - protein, 687 aa, Clavispora sp.
  source 1..687: note = SBI00264_Glutamine--fructose-6-phosphate transaminase
MCGIFGYVNFLVDRTRGEIVDNLLEGLLRLEYRGYDSAGIAIDGKEKGENYILKSPGKVKSLETMIATQNIDRKQVFDNHVGIAHTRWATHGQPEYLNCHPHRSDPTGEFLIVHNGIITNYRELKTLLLSKGFVFESETDTEVIAKLFKHMYDTNIKSGNYVDFNELTKQVLYELEGSYGLLVKSSHFPGEVCGTRKGSPLLVGVKTERKLKVDFVDIEFPENQDLYPENPLAVGGPESNLRTSQLRAFFAEDGIPSPVEFFFSSDPASVIKHTRKVLFLEDDDIAHIYDGELHIHRAKKSIAGESTVRPIQTLEMELNEIMKGPYTHFMQKEIFEQPDSTFNTMRGRLDFENNTVMLGGLKQWLPTIRRCRRIIMIACGTSYHSCLATRSTFEELTDIPVSVELASDFLDRRSPVFRDDTCIFVSQSGETADSMMALQYCLDRGALTVGVVNSVGSSMSRQTHCGVHINAGPEIGVASTKAYTSQYIALVMVALSLSNDSISKKQRHAEIIQGLKKVPEQITRVLKLEDKIKQLCNDFLDKQKSLLLLGRGFQFATALEGALKIKEISYMHSEGVLAGELKHGVLALVDGELPIIAFATKDSLFPKVMSAIQQVIARGGRPIVICNEGDNVCGEEAYTTLHVPLTVDCLQGLLNVIPLQLMSYWLAVNRGIDVDFPRNLAKSVTVE

SEQ ID NO: 1175 - protein, 257 aa, Clavispora sp.
  source 1..257: note = SBI00264_14-3-3 family protein 7
MPASREDSVYLAKLAEQAERYEEMVENMKAVASSGQELSVEERNLLSVAYKNVIGARRASWRIVSSIEQKEEVKGNEQQVSLIREYRSKIEAELTKICEDILSVLTDHLITSAQTGESKVFYYKMKGDYHRYLAEFAIAERRKEAADLSLEAYKSASDVAVTELPPTHPIRLGLALNFSVFYYEILNSPDRACHLAKQAFDDAVADLETLSEDSYKDSTLIMQLLRDNLTLWTDLSETPAQQEEQDAQPAEAKPEEE

SEQ ID NO: 1176 - protein, 527 aa, Pichia fermentans
  source 1..527: note = SBI00817_Aldehyde dehydrogenase
MLKFATKTSAIRASPRLFSASAIAAARFYSSLPLSQTITLPNGQTYEQPTGLFINGEFVKSQQHKTFEVIDPSTEEEITHVYEARADDVDLAVNAAHKAFHSEWSRCDPAIRGKYLFQLADLMEANKDTLAAIESMDNGKALSMAQGDVGLVVDYLRYCAGWADKLNGKLVDTGSNYFNYIKREPIGVCGQIIPWNFPLLMWSWKIGPALAAGNTVVLKTAESTPLSALYAAKLVQEAGIPKGVVNIVSGFGKITGEAISTHPKIKKVAFTGSTATGKHIMKAAAESNLKKVTLELGGKSPNIVFNDADIKKAVQNLIVGIFYNSGEVCCAGSRVFIQEGVYDQVLEEFKSAAEHLKVGNPFEDGVFQGAQTSQQQLSKILSYVDSGKKDGASLVTGGERLGSKGYFVKPTIFADVTPEMKIYSEEIFGPFAVVTKFKTADEVIEMANDSEYGLAAGIHTSSLDTATYVANKLEAGTVWINTYNDFHANMPFGGFKQSGIGREMGEAAFENYTQWKTVRIAVNDGPQ

SEQ ID NO: 1177 - protein, 261 aa, Pichia fermentans
  source 1..261: note = SBI00817_14-3-3 family protein 7
MSLSREDSVYLAKLAEQAERYEEMVENMKAVASCGQELSIEERNLLSVAYKNVIGARRASWRIVSSIEQKEEQKGNESQVKLIRDYRSKIELELSNICDDILNVLNEHLIPTAQSGESKVFYYKMKGDYHRYLAEFAVAEKRKDAADASLEAYKAASEVAVTELPPTHPIRLGLALNFSVFYYEILNSPDKACHLAKQAFDDAIAELDTLSEESYKDSTLIMQLLRDNLTLWTSDMSEAGQEDSNAQAAQPQAAAPEKQEE

SEQ ID NO: 1178 - protein, 327 aa, Pichia fermentans
  source 1..327: note = SBI00817_Ribose-phosphate diphosphokinase
MTNKETRNNIKIVAANSHPELAKAIATKLNLPLSKIEAIQFENQESAVVVQDSVRDEDVYIIQTGCGGYEKLNDYLMELLLMVHACTQASARSITAVIPNFPYARQDRKDKSRVPISAKLIANLLTTAGCTHVITMDLHASQIQGFFSIPVDNLYAEPNVLKWIQDNYKNTEDVMMVSPDAGGAKRVASLADKLDTQFALIHKERAKANEVSRMVLVGDVKDKSCILVDDMADTCGTLCKASDILLAEGAKEVIAIVTHGIFSGNAIERLNKSSLKKIICTNSMPLAQHVQDCAILEILDISPTLAEAIRRLHNGESISYLFNNVAV

SEQ ID NO: 1179 - protein, 320 aa, Pichia fermentans
  source 1..320: note = SBI00817_Ribose-phosphate diphosphokinase
MSANSIKLLAPDIDRGLAELVAKRLGLPLTPVEFKRDSNKEVLFSIGESIRDEDIYVIMQIGAGPVNDKVFELLVMLNACRAASARRITAVLPNFPYARQDRKDKSRAPITAKLMADMLTTAGCDHVITMDLHASQIQGFFDSPVDNLYAEPSVVRYIKDKIDIGNAIIISPDAGGAKRAAGLADQLDLNFALIHKERARANEVSRMVLVGDVTDKICIIVDDMADTCGTLAKAANVLLDNGAKSVIAIVTHGILSGKAIENINNSRLERVVCTNTVPFESKLLQCPKLDTLDISGVLAEAIRRLHNGESISFLFKNAPY

SEQ ID NO: 1180 - protein, 261 aa, Pichia fermentans; identical to SEQ ID NO: 1177
  source 1..261: note = SBI00817_14-3-3 family protein 7

SEQ ID NO: 1181 - protein, 1871 aa, Pichia fermentans
  source 1..1871: note = SBI00817_1,3-beta-D-glucan synthase
MSYDDNYDPNRANQGYYDQGYYEQGPGQAQGDQGQSQRGYYDESQQPQQQYPQDPYYGNPQEYDQQQFNQPPPQQGGYYDQQNPNDAETYSDFSYGAGNMPGTPYDNGGNYNQGYGANYTPSQMSYGDARDSGASTPYYGAGGMNGMYDQGMIALPTDPYPAWTADNQAPVTIEQIEDVFIDLCNKFGFQRDSMRNMFDYFMVLLDSRSSRMTPAQALLSLHADYIGGDSANYKKWYFAAQMDVDDRVGFANIDLGKIKKSKKKSKKSIFKRKKKDDNLEVDNPDQVLNEIEGDDSLEAGDFRWKSTMNKTTAIEKVQQIALYLLVWGEANQVRFTPECLCFIYKCAADYLKSDACQNRVDPIPEGDYLNRIITPLYRFLRDQVYEIADGRFVKREKDHNKIVGYDDVNQLFWYPQGMARMYVGETRLIDLPQEERYLQLGEIDWNSTFVKTYKETRTWLHVITNFNRIWVFHISIYWMYCAYNSPTLYTHNYVQVLNNQPLASSRWASAALGGAVASFINIMATLFEWMYVPRSWAGAQHLTRRLIFLLILFGINIGPVIFVFAYAGLTTVSTAALAVSIVMFFFAVGTVVYLTIMPLGGLFTSYMKGSSRRYLAQQTFTASFYQLEGLDRYLSYMVWITVFAAKFSESYYFLILSIRDPIRNLSTMTMRCHGEQWWGDVLCKQQAKIVLGLMYATDMLLFFLDTYMWYILVNTIFSVGRSFYLGISILTPWRNIFSRLPKRIYSKVLATTDMEIKYKPKVLISQVWNAIVISMYREHLLAIDHVQKLLYHQVPSEIEGKRTLRAPTFFVSQDDNNFATEFFPKDSEAERRISFFAQSLATPIPEPLPVDNMPTFTVFTPHYSEKILLSLKEIIREDDQFSRVTLLEYLKQLHPIEWDCFVKDTKILAEETVAFEDEKDDDVKQEIDDLPFYCIGFKSAAPEYTLRTRIWASLRSQTLYRTVSGFMNYARAIKLLYRVENPEIVQMFGGNAEGLERELERMARRKFKFVVAMQRLAKFKKEELENAEFLLRAYPDLQIAYLDEEPPLEEGGEPRIYSALIDGHCEIMPNERRRPKFRVQISGNPILGDGKSDNQNHAVIFSRGEYLQLIDANQDNYLEECLKIRSVLAEFEELNETAKVTHPVAIVGAREYIFSENAGILGDIAAGKEQTFGTLFSRTLAQIGGKLHYGHPDFLNAIYMLTRGGVSKAQKGLHLNEDIYAGMTALCRGGRIKHCEYYQCGKGRDLGFGSILNFTTKIGAGMGEQMLSREYYYLGTQLPLDRFFSFYYAHLGFHINNLFISVSLQMFMLTLVNINSLAHESIICIYDKNKPITDVVYPLGCYNLMPTIDWIRRYTLSIFIVFFISFVPLLVQELIERGIWKMAYRFARHFSSLSPLFEVFVAQVYSTALVNDVAIGGARYIATGRGFATSRIPFSVLYSRFAEGTIYVGARCVIMLLFGTIAHWQPALLWFWTIIVALMFSPFVFNPHQFSWEDFFIDYRDYIRWLSRGNTKWHRNSWIGYVRLARSRVTGFKRKTIGDQSESAAGDAPRAHRSTVLMSDTIPCAIYTAGLFVAYTYINAQTGVRDAKLVNATLRLIICALAPIVIDIGVLFGCLGFSCCSGPLFGMCCKRTGAVMAGVAHGIAVVIHLVFYVVMWVLEGFHFARMLIGLITMIYVQRLIFKCMTLFLLTREFKNDHSNVAFWTGKWYGSGLGIAAWTQPSREFCAKIIELSHFSGDFVLGHILLFLQFPLVCIPYVDRWHSMMLFWLKPNRQIRPPIYSLKQARLRKRMIKKYSVLFYTIMVIFIALIAAPAVVGSLKGVDIHATAEFPSFADGLFQPRHQDNNDTGFGSGSYHPRWTTTTSLVTFSTKK

SEQ ID NO: 1182 - protein, 730 aa, Pichia fermentans
  source 1..730: note = SBI00817_1,3-beta-D-glucan synthase
MSYDDNYDPNRANQGYYDQGYYEQGPGQAQGDQGQSQRGYYDESQQPQQQYPQDPYYGNPQEYDQQQFNQPPPQQGGYYDQQNPNDAETYSDFSYGAGNMPGTPYDNGGNYNQGYGANYTPSQMSYGDARDSGASTPYYGAGGMNGMYDQGMIALPTDPYPAWTADNQAPVTIEQIEDVFIDLCNKFGFQRDSMRNMFDYFMVLLDSRSSRMTPAQALLSLHADYIGGDSANYKKWYFAAQMDVDDRVGFANIDLGKIKKSKKKSKKSIFKRKKKDDNLEVDNPDQVLNEIEGDDSLEAGDFRWKSTMNKTTAIEKVQQIALYLLVWGEANQVRFTPECLCFIYKCAADYLKSDACQNRVDPIPEGDYLNRIITPLYRFLRDQVYEIADGRFVKREKDHNKIVGYDDVNQLFWYPQGMARMYVGETRLIDLPQEERYLQLGEIDWNSTFVKTYKETRTWLHVITNFNRIWVFHISIYWMYCAYNSPTLYTHNYVQVLNNQPLASSRWASAALGGAVASFINIMATLFEWMYVPRSWAGAQHLTRRLIFLLILFGINIGPVIFVFAYAGLTTVSTAALAVSIVMFFFAVGTVVYLTIMPLGGLFTSYMKGSSRRYLAQQTFTASFYQLEGLDRYLSYMVWITVFAAKFSESYYFLILSIRDPIRNLSTMTMRCHGEQWWGDVLCKQQAKIVLGLMYATDMLLFFLDTYMWYILVNTIFSVGRSFYLGFGNH

SEQ ID NO: 1183 - protein, 725 aa, Pichia fermentans
  source 1..725: note = SBI00817_Beta-glucan synthesis-associated protein KRE6
MAPRNLTSRAPLPGHSNTNSNTNSELSDENLNFENPFSQDNDTDSSHIHLPYGNQEYEDSTSSGNSNTHLNQTGRFNTSSASPEIKQHPLNPNGGNGNPGSFRNSSTSSSSLLNPFSSSNRLSTLANETSKTPEYGRYPKNLSGSRINSMHSLNGKHPYNISSTDNENENDDSNSNSDRSSNPFMVDPDFSPFGGYPTSSFPLMIDEKEDDDYLHNPDPIEDAKYQKHRMWNDLKTMDKRSSTTLFGLLFFFLGAMALFVVLPALTFTHAVHHTVPVKGGSTGSNAFYGPAGSNAEYTKNGTIVLTEYLYPQLSAIRTSLVDPDTPEQYHTRTAKDGSDWKLVFSDEFAAEGRTFYEGDDQFWYAPDFHYDATKDLEWYDPDAVTTANGTVNMRMDAFMNHNLYYRSGMLHSWNRMCFTQGVMEVSARLPNYGNITGLWPGMWAMGNLGRPGYMASTDGVWPYSYDTCDAGITFNQSSPDGINYLPGQRLNSCTCPGDDHPNPGTGRGAPEIDILEGEVDTNIRVGVASQSMQIAPMDIWYIPDYNWVEIHNASVTTMNTYAGGPFQQAVSGITTLNTDWYNRGVGERYFQKYAFEYLNDNNDGYVRWFVGDNPTFTVHANALAPNGNIGWRRISKEPMSMIINMGISKNWAYIDFPSIDFPVTLEVDSVRIYQPSDQINVSCDPEDYPTYDYINEHPLAYNIWNYTLWNQTGYSIPKNTLVGCK

SEQ ID NO: 1184 - protein, 670 aa, Pichia fermentans
  source 1..670: note = SBI00817_acetyl-coenzyme A synthetase 1
MSEKHLENEHLMNIEAHEVPKGFLDRHPSKPYLQSLGEYEKMYKESIESPATFFGKMAKDNLSWSKPFTTAKLPEAPHLKDNNGEPSAWFVDGELNACYNCVDRWAIKNPNKPAIIYEADEPNEGRIITFGELLKDICKFAQVLKSLGVKKGDTVAVYLPMIPEAIVALMAIVRIGAIHSVVFAGFSSTSLKDRVLDANSKIVITTDESKRGGKIIETKKIVDDALIHCPDVTNVVVFKRTGNSHIPWNSKRDVWWHEEVIKYGSYTPPEPMNSEDPLFLLYTSGSTGKPKGILHTTAGYLLGAMLTTKYVFDVHPEDTLFTAGDVGWITGHSYVVYGPLLNGAATVVFEGTPAYPNFSRYWEIVDKYKVNQFYVAPTALRLLKRAGEKYIANYKLDSLRVLGSVGEPIAKDVWEWYNEFIGRGQAHICDTYWQTESGSHLICPLAGVTPTKAGSASLPFFGIEPAICDPVTGEELPGNNVEGVLCVKTSWPSITRSIWNDYNRYLDTYLKPYHGYYFSGDGAARDKDGFYWILGRVDDVVNVSGHRLSTAEIEAALIEHPLVSENAVVGYPDELTGSAVAAFVSLKKEVDDVAAVKKELILTVRKEIGPFAAPKLILLVEDLPKTRSGKIMRRILRKVLAGEEDQLGDISTLSNPEVVAQIIDVVHAMK

SEQ ID NO: 1185 - protein, 674 aa, Pichia fermentans
  source 1..674: note = SBI00817_acetyl-coenzyme A synthetase 2
MTAPTHSVVHEANGVVARPTPQPFFEKQPAKSLSSKEEYDAMYKQSIEDPEGFFGPMAKQFLSWDKDFTKVKSGTLQNGDAAWFLGGELNACYNCVDRHAFANPDKVAIVFEADDESENKKITFGELLREVSQVAGVLKSWGVRKGDTVAIYLPMTPEAIIAMLACARLGAVHSVIFAGFSAGSIKERVTDAQSKILITTDEGKRGGKTINNKKIVDEALKECPSIEKVLVYKRTGSDKIYMQEGRDFYWQDVAAEFPGYCPPVSVNAEDPLFMLYTSGSTGAPKGVVHCTGGYLLGAAMTTKYVFDLQPEDVLFTAGDVGWITGHSYALYGPLSLGVSTIIFEGTPAYPNFGRFWRIIEQNKATHFYVAPTALRMLKKSGEDEIAKYDLSSLRTLGSVGEPIASEIWQWYDEKIGHGCCHISDTYWQTESGAHLIAPLAGAVPTKPGAATLPFFGIDAVIIDPTTGKVLEGNDVEGVLAVKNTWPSMARTVYKNHKRFMETYLKPYPGYYFTGDGAGRDHDGYYWIRGRVDDVVNVSGHRLSTAEIEAVLLEDSARVSDAAVVGVNDDITGQAVIAFVQLKDNSIITDDATMLKLRQDLRLSIRATIGPFAAPKTIIIVDDLPKTRSGKIVRRVLRKIVSGEAKGLGDQSTLANAEVIEPIIVAVEKQYGVKN

SEQ ID NO: 1186 - protein, 351 aa, Pichia fermentans
  source 1..351: note = SBI00817_alcohol dehydrogenase
MSNFEIPETQKGCIFYENGGPIEYKDIPVPKPKPTEILIKVLYSGVCHTDLHAWKGDWPLAVKLPLVGGHEGAGVVVAKGENVTSFEIGDYAGIKWLNGSCMGCEFCMQGAEPNCAKADLSGYTHDGSFQQYATADAIQAAHIPKGTDLAGIAPILCAGVTVYKALKTADLRAGQWVAISGAGGGLGSLAIQYAKAMGLRVLAIDGGDDKDKLCKSLGAEVFIDFMKTKDIVADIVKATDGGAHGVINVSVSEKAIAQSCQYARTLGKVVLVGLPAGAKINTPVFDAVVKSIEIKGSYVGNREDTAEALDFYIRGLVHSPFKVQGLSELPQVFDDMAQGKILGRVVLDTSK

SEQ ID NO: 1187 - protein, 527 aa, Pichia fermentans; identical to SEQ ID NO: 1176
  source 1..527: note = SBI00817_Potassium-activated aldehyde dehydrogenase

SEQ ID NO: 1188 - protein, 376 aa, Pichia fermentans
  source 1..376: note = SBI00817_alcohol dehydrogenase
MFSRTLTINKQAIKNNQRFFLRGVASAAPSIPKTQKGVIFYENGGELQYKDIPVPEPKANEILINVKFSGVCHTDLHAWKGDWPLATKLPLVGGHEGAGVVVAKGENVTNFEIGDLAGIKWLNSSCMGCEFCQQGAEPNCPRADLSGYTHDGSFQQYATADAIQAAPIPKGTDLAHVAPILCAGITVYKALKTANLRPGQWVAISGAAGGLGSLAVQYAKAMGLRVLGIDGGKEKGEFVKSMGGEVFIDYTKSSDIVKDIQEATNGGPHGVINVSVSPAAISQSTKYVRTLGKVILVGLPANAICESSVFEHVIKSIQIKGSYVGNREDTTEAIDFFTRGLVKSPIKVVGLSDLPKIYELMEQGKILGRYVVDTSF

SEQ ID NO: 1189 - protein, 377 aa, Pichia fermentans
  source 1..377: note = SBI00817_alcohol dehydrogenase
MLRTAFRRQALRAVRFQSTTTPVFTIPEKQMGVIFETHGGPLEYKELPVPKPKPTEILINVKYSGVCHTDLHAWKGDWPLAAKLPLVGGHEGAGVVVAKGSAVTNFEIGDLAGIKWLNGSCMSCEFCEQGDESNCEFADLSGYTHDGSFQQYATADAIQAAKIPVGTDLANVAPILCAGVTVYKALKTAQLRAGQWVAISGAAGGLGSLAVQYAKAMGLRVIGIDGGEGKKELFEACGGDVFIDFTKYPRDAPEQMNKDIKAASNGLGPHGVINVSVSPTAISQSCEYVRATGKIVLVGMPAGAVCKSDVFQHVVKSLQIKGSYVGNRQDTREALEFYIDGKVKSPIKVVGLSKLPEIYELMEQGKILGRYVVDTSK

SEQ ID NO: 1190 - protein, 376 aa, Pichia fermentans
  source 1..376: note = SBI00817_alcohol dehydrogenase
MFSRTITINKQAIKNNHRFFLRGIASAAPSIPKTQKAVIFYENGGELQYKDIPVPQPKPNEILINVKFSGVCHTDVHAWKGDWPLATKLPLIGGHEGAGVVVAKGENVTNFEIGDLAGIKWLYSSCMGCEFCQQGAEPNCPKANISGYTHDGSFQQYATADAVQAAHIPKGTDLAHIAPILCAGITVYKALKTADLRPGQWVAISGAAGGLGSLAVQYAKAMGLRVLGIDGGTEKGEFVKSMGGEVFIDYTKSSNIVKDIQDATNGGPHGVINVSVSPAAISQSTKYVRTLGKVILVGTPTDAICESSVFEHVIKSIQIKGSCVGNREDTAEAIDFVTRGLVKSPIKVVGLSDLPKVYELLEQGKILGRYVVDTSF

SEQ ID NO: 1191 - protein, 411 aa, Pichia fermentans
  source 1..411: note = SBI00817_isocitrate dehydrogenase
MAFEKITVKTPVVEMDGDEMTRIIWKMIKDELILPFLDIDLKYYDLGIEYRDQTDDKVTVESAEATKKYGVAIKCATITPDEARVEEFGLKKMWLSPNGTIRNILGGTVFREPIIIENIPRIIQHWEKPIVIGRHAFGDQYKCQNIVTPECGGDLKLVFTPKDGSAAIEVPVYHYDGKGCALAMYNTEESIIGFATASFELAVSRKLPLYMSTKNTILKQYDGLFKDTFERIYEESYKTKFEELGIWYEHRLIDDMVAQMVKSKGGYIIAMKNYDGDVESDIVAQGFGSLGLMTSVLVSADGKSFEAEAAHGTVTRHYRQHQQGKETSTNSIASIFAWSRGLLKRGELDETPAVVQFAETLEKATIDTVKVDGIMTKDLALARGETDRSSYVTTGEFIEAVGKRLTKELGA

SEQ ID NO: 1192 - protein, 445 aa, Pichia fermentans
  source 1..445: note = SBI00817_isocitrate dehydrogenase
MFSAAARAQARLSSIHRHFSTSVSVGAETISKIKVKNPIVELDGDEMTRIIWSDIKSKLILPYLDVDLKYYDLSIQSRDATDDQITIDAAKAIQKYGVGIKCATITPDEARVKEFNLKKMWLSPNGTIRNILGGTVFREPIVIGSGPNKDPNDIEIPRLVPGWKKPIIIGRHAHADQYKATDFVVPEAGTLELTFTPKNANGEKITRKVYEYKDAGVALAMYNTDESIEGFAHSSFKMALSRNAPLFLSTKNTILKKYDGRFKDIFQQIYESTYKTQFEAKGLTYEHRLIDDMVAQMLKSQGGFVIALKNYDGDVQSDIVAQGFGSLGLMTSVLMTPDGKAFESEAAHGTVTRHYRRYQQGEKTSTNSIASIFAWTRGLAQRGKLDNTPEVVDFANTLEKCVLDTVSKDGIMTKDLALLVHRKEYADTEGFLEAVASRLSKTVTK

SEQ ID NO: 1193 - protein, 603 aa, Pichia fermentans
  source 1..603: note = SBI00817_NAD-dependent malic enzyme
MTQDCCEIKKTPVGEEAKVTVPQSTRLSAVGPIECPLKGFQLLNSPLFNKGTAFTLEEREAFGLNGLLPPVVNTLEEQVQRSYRQLHFLKSLLAKNDFCTSMRLQNKVLYYKLVKEHIRELIQIVYTPTEGDAIIAYSERFRKPEGCFLDITRPDEIDLRLAPFGNDKDIDYIVVSDSEGILGIGDQGVGGVRITIAKAALMTLCGGLHPGRVMSVVLDVGTNNKKLLEDDLYLGNRFPRVRGQEYDDFVHKAMTAMQKRFPNAVIHFEDFGVTTARPVLNRYRNVLPCFNDDIQGTGAVVMASMAAGLKLTGRDLLDSTVLIYGAGSAGIGIADQIVNHMVIHGASTELARSKIFCMDRFGLLLKGMDTNSEVQNLFAKDPAEWEGVDTKSLVEVIKKVQPTALVGCSTQAGAFNEDVIKQMYKHNPRPMIFPLSNPTRLHECFPDDALKWTEFNALVATGSPFPPVEGHVISENNNCFTFPGIGLGAVLSRATTISDAMISAAVDELASLSPAMENPKAGLLPPIEQIDETSARVATALILQALKEGHARIEEETAPSGGKVSVPREFEACLSWVKEQMWRPVYRPMVKVEHSATIHTHQY

SEQ ID NO: 1194 - protein, 334 aa, Pichia fermentans
  source 1..334: note = SBI00817_malate dehydrogenase
MFSRTSARQFSSSAKSAYKVTVLGAAGGIGQPLSLLMKLNTKVTKLSLYDLRLGKGVATDLSHIPTNSTVEGFGPEEDGLANALKGSDVVLIPAGVPRKPGMTRDDLFNTNASIVRDLAKAAAENCPNAALLVISNPVNSTVPIVAEVLKSKGVYNPKKLFGVTTLDVLRSSRFLSEVVNTNPATETVTVVGGHSGVTIVPLLSQTKHKDLPKDQYDALVHRIQFGGDEVVQAKNGAGSATLSMAQAGARMAGSVLKGLAGEADVTEPTFIDSPLFKSEGVEFFSSRVTLGVDGVKEVHPLGNLSTAEEEMVTVAKDTLKKNIQKGIDFVKANP

SEQ ID NO: 1195 - protein, 556 aa, Pichia fermentans
  source 1..556: note = SBI00817_malate synthase
MPAQIYVTSLDDVQVLGEVSDKTLLSPTTPKDILTKEALKFVVMLHRAFNETRKQLLANRQEVQKKLDAGESLHFLKETEYIRNDPNWRCNPTHPKLMSRKVEITGPPDAKMIVNAFNTDVHTYMTDFEDSCAPTWSNMLYGQVNLYDGIRDQIDFTNEKTGKRYKINKEGRRVPVMIVRPRGWHMVDSHITVSGEPISASILDFGLFFFHNAKYLISQGLGPFFYLPKMEHWLEAKLWNDIFCVAQDALEIPRGTIKATVLIETLPISYQLDEVLYALRDHSSGLNCGRWDYMFSTIKRLRNQKDHILPDRQQVTMSVPFMSNYVKQLIKICHKRGVHAMGGMAAFIPIKDDPAANSTALEAVRKDKLREVLAGHDGTWIAHPGLLDTALSVFEKHMPTPNQLFAQKTDNVTEADLVDTNIKGGEITMKGLNANIFIGLNYMESWLRGLGCVPINHLMEDAATAEVSRLQLWSWCKHQVKMDDTGKTITADYVCQLIDEEVAKLDHREGNKFAIAAGALKEELTGRKPLAEFLTDILYPYIATPGTPIDLSTLKA

SEQ ID NO: 1196 - protein, 573 aa, Pichia fermentans
  source 1..573: note = SBI00817_Pyruvate decarboxylase
MVDQISLGTYIFEKLKESGVHSVFGVPGDFNLALLDHIKEVDNLRWVGNANELNAGYEADGYSRINGFAALITTFGVGELSAVNAVAGAYAEHVPLIHIVGMPSQSAEKKKLLLHHTLGDLRFDEFVEMSKNISIKVKVINDLDTAPAEINDLIETAVLTKRPVYLGLPSNFSDALIPKSLVSSLKLKLSLPPNDKETENEFVENVYGVIEKAERGIILVDACASRHAVTEEVKKLAQLTKFPVFTTPMGKSSFDEDNEEFYGLYVGELSSPDVKEIVESTDCILSIGGLLSDFNTGSFSYAYSTKNVVEFHSNYCKFKAATYTDLQMNGALANLTNQLKGYTKQQQVIPVPKSKFEYESAKVTPEGKLTQKYMWNRLSYFFQENDIIVSETGTSSFGILSAHFPKNSKAISQVLYGSIGFSLPAAVGAAFAAEDIKNFEEPSLDRRTSLFIGDGSLQLTVQAISDACRWNVKPYLFVLNNNGYTIEKLIHGPYESYNNIQPWKHQLMLEFFADKTQYENHTVKTAKEFDTLLKDPEFNKPTKIRVIELMLDEFDAPEALVKQGKLSEKMNSA

SEQ ID NO: 1197 - protein, 414 aa, Pichia fermentans
  source 1..414: note = SBI00817_succinate--CoA ligase [ADP-forming] subunit beta
MFSAAVTKTVLKKSFQQVRNLSIHEFRSAALLKSYGIGVPRGEAAFTADEAYKAAKDLNTKELVIKAQALTGGRGKGHFDNGLQSGVRLIESPEEAKDLAEKMIGHKLITKQTGAAGKLVTAVYVVERKYALQEAYLSIVMDRKNQSTMVIASSQGGMDIEGVAKKDPNAIKTYPVDIDAGINDSLATEIASQLGFTADAVPKAASTIQKLYTIFKEKDATQIEINPLSETKEHDVMCMDAKFGFDDNAEYRQKEVFSWRDTTQEDPDEVTASKYGLNFIKLDGNIGCLVNGAGLAMATMDVVKLYGGAPANFLDVGGAATPETIEKAFELILTEKKVSAIFVNIFGGIVRCDFVADGLIQATKNLGLKIPVVVRLQGTNFKIAKEMIDNSGLKLYLEEDLDKAAEKVVELGKN

SEQ ID NO: 1198 - protein, 321 aa, Pichia fermentans
  source 1..321: note = SBI00817_succinate--CoA ligase [ADP-forming] subunit alpha
MLGFRRSFHSARQLRNYADTINNLKINKDTKVIFQGFTGRQATFHAEQALAYGTQIVGGTNPKKAGEVHLGKPVFATVAEAMKHTGATASGVFVPPPIAASAVREAIEAEIPLVVCITEGIPQQDMLRISQMLKTQSKTRMVGPNCPGIIAPEQCKIGIMPQSIHKRGKIGIVSRSGTLTYEAVAQTTQVGLGQSLVIGMGGDPSPGTNFIDALTLFLNDPETEGIIMIGEIGGSAEEEAAEFLKQHNLTRDVPKPVVSFIAGVTAPPGRRMGHAGALISGGKGTAQSKIEALTAANVEVVPSPGRLGEALHQQFVDRKLL

SEQ ID NO: 1199 - protein, 643 aa, Pichia fermentans
  source 1..643: note = SBI00817_succinate dehydrogenase
MLSRLARHGALSRAALSSRQLSTTTPRAQIVSNLNSLNGKEAASSMGKDYHVIDHEYDCIVIGAGGAGLRAAFGLVKEGFKVACISKLFPTRSHTVAAQGGINAALGNMHKDDWHWHMYDTVKGSDWLGDQDAIHYMTREAPPSIIELEHYGLPFSRTKEGKIYQRAFGGQTKDFGKGGQAYRTCAVADRTGHALLHTLYGQSLRYDTHYFLEFFAMDLLKHNNEIVGCIAYNQEDGTLHRFKAHKTIIATGGSGRAYFSCTSAHTCTGDGNAMVSRAGYPLEDMEFIQFHPSGIYGSGCLITEGARGEGGYLINSEGERFMERYAPHAKDLACRDVVSRAITMEINAGRGVGPEKDHMFLQLSHLPASVLQERLPGISETARIFAGVDVTKEPIPILPTVHYNMGGIPTKWTGEALTINEKGEDEVIPGLFACGEAACASVHGANRLGANSLLDLVVFGRAVAHTIAAEMKPGMPHKELPADIGFESIENLDKLRNANGNVATADLRLEMQKAMQKHVAVFRTQDNMDAGVTELEKIDAKFADIKTTDRSMIWNTDLTETLELQNLLTCARQIALSAANRKESRGAHARDDYQERDDVNWQKHTLSWQTKTGEPVKLGYRDVVTHTLDENECKAVPPAVRAY

SEQ ID NO: 1200 - protein, 348 aa, Pichia membranifaciens
  source 1..348: note = SBI01187_Alcohol dehydrogenase
MSIPTTQKAIVFETNGGPLLYKDIPVPTPKPNEILVNIKYSGVCHTDLHAWKGDWPLATKLPLVGGHEGAGVVVALGSQVKGWEVGDYAGVKWLNGSCLNCEYCQKSAESNCAEADLSGYTHDGSFQQYATADAIQAAKIPKGTDLAEVSPILCAGITVYKALKTANLEAGQWVAISGAAGGLGSLAVQYAKAMGYRVIAIDGGDEKGEFVKSLGAEYFVDFTKVKDVVKEIQTATNGGPHGVINVSVSEAAVNQSAQYVRPTGTVVLVGLPAGAKITAPIFDSVVKSINIRGSYVGNRADSAEAIDFFARGLIKCPIKIVGLSELENIYTLMEQGKILGRYVVDTSK

SEQ ID NO: 1201 - protein, 377 aa, Pichia membranifaciens
  source 1..377: note = SBI01187_Alcohol dehydrogenase
MLKLLSTAPRNSFRAIALTSAPRFRFQSTFTIPETQKAVVFETNGGPLEYRDIPVPKVRPNEILVNIKYSGVCHTDLHAWKGDWDLQTKLPLVGGHEGAGVVVGLGENVTGWKLGDYAGVKWLNGSCMSCELCEEGHESNCDDADLSGYTHDGTFQQYATADAIQAAKIPKGTDLAEVAPILCAGITVYKALKEASLKQGQWVAISGAGGGLGSLAVQYAKAMGFRVLAIDGGSDKGQLVKSLGAEEYIDFTTVQDVPKAAIATTGGGPHAVINVSVSPQAMQQSTEYVRKTGTVVLVGLPAGASINSPVFDTVLKCVTIKGSYVGNRADTREAIDFFARGLVKSPIKIAGLSELPRIFKEMEAGNILGRYVVDTSY

SEQ ID NO: 1202 - protein, 420 aa, Pichia membranifaciens
  source 1..420: note = SBI01187_Isocitrate dehydrogenase
MYSCSSPSGSKNPIVELDGDEMTRIIWSDIKKKLILPYLDVDLKYYDLGIESRDATDDKITVDAANAIRKYGVGVKCATITPDEARVKEFNLKKMWLSPNGTIRNILGGTVFREPIVIGSGPDKQPGDIEIPRLVPGWKKPIIIGRHAHADQYKATDFVVPEAGSLEITFTPKNPSGEKISRKVYDYQGPGVALAMYNTEDSIRGFAHSSFKMALSRKAPLFLSTKNTILKKYDGKFKDIFQEIYESSYKADFEKAGITYEHRLIDDMVAQMLKSQGGFVIALKNYDGDVESDIVAQGFGSLGLMTSVLITPDGKAFESEAAHGTVTRHYRRYQAGEKTSTNSIASIFAWTRGIAQRGKLDNTPDVVEFANTLEKCVLDTVSKDGIMTKDLALLVQRKDYADTEGFLDAVASRLANTLQK

SEQ ID NO: 1203 - protein, 589 aa, Pichia membranifaciens
  source 1..589: note = SBI01187_NAD-dependent malic enzyme
MTRDNCQVVKKTPVGEEARVQISHSTRLSVAGPIECDLAGSHLLNSPLFNKGSAFSKEERIAFGLEGLLPPVVNTLDEQVDRAYKQLHFLKTLLAKNDFCTSMRLQNKVLYYKLVREHIKELIPIVYTPTEGDAIIAYSDRFRKPEGCFLDITEPHNIDKRLAQFGEDKDVDYIVITDSEGILGIGDQGVGGVRIAIAKAALMTLCGGLHPGRVIACVLDVGTNNKKLLEDDLYMGNRFPRVRGKEYDDFTNKCIMAMQKRFPSAVIHYEDFGVTTARAVLDRFRHVLPCFNDDIQGTGAVVMASMAAALKLTDRNLLDSRVLIYGAGSAGLGIADQIVNHMIIHGATQEQARARIYCMDRFGLLLTGMKTNSPAQEGYAHNPKDWEGVDTKSLVEVIGKVKPTCLIGCSTQAGAFNEQVIKEMYKFNPRPMIFPLSNPTRLHECVPEDALKWTDYNALVATGSPFPPVEGHVISENNNCFSFPGIGLGAVLARATTISDAMISAAVDELASLSPAQNDPKAGLLPPIEEIDETSARVATAVILQCVKEGHSRVESEDSPVGGKEQMWRPEYRPMIKVEHSDEIHTHQY

SEQ ID NO: 1204 - protein, 633 aa, Pichia membranifaciens
  source 1..633: note = SBI01187_Probable succinate dehydrogenase flavoprotein
MLTQLFKQHNPIIKSSLTLSRRLQSTTAADISKKYNIIDHEYDSIVIGGGGAGLRAAFGLSEAGFKTACISKVFVTRSHTVAAQGGINAALGNAHKDNWKHHMYDTVKGSDWLGDQDAIHYMTKNAPAAIYELEHYGVPFSRFPNGKIYQRAFGGQTKDYGKGGQAYRTCAVADRTGHSILHTLYGQATKHDTDFFIEYFVLDLLKLNGEVVGCIAYNQEDGTIHRFRAHNTVVATGGYGRVYASCTSAHTCTGDGGAMVSRAGFPLQDLEFVQFHPTGIYGSGCLITEGARGEGGYLVNSEGERFMERYAPSAKDLACRDVVARAITQEIAEGRGVGPKKDHMYLQLSHLPKDVLAERLPGISETIKIFSGIDITEKPAEIQPTVHYNMGLIPTNYHGQALTVDEAGKDQFIKGLYACGEAACASVHGANRLGANSLLDLVIFGRAVAHHIRDTTKPGEAHKPAPADLGFESLLNFEKLRTAKGTKRTAEIREHMQDVMQKHVSVFRTEPLLQEGVNQMKEVSKTFKDVKVEDDSLIWNSDLVETLELQNLLTLANQTAVSALTRKESRGAHVIVDPVTKEQVPRDDVNWLKHSLSYQKDITDDVEMKFRSVVMTTLDETECPPVPPAVRAY

SEQ ID NO: 1205 - protein, 265 aa, Pichia membranifaciens
  source 1..265: note = SBI01187_Succinate dehydrogenase iron-sulfur subunit
MFRSLLRSHSFAPIAKSSARNLATEASVPARLKTFQIYRWSPDTPEVEPKMQTYQVDLNKCGPMVLDAILKIKNEQDATLTFRRSCREGICGSCAMNIGGTNTLACLCRIDTDTNKDLKIYPLPHMFIVRDLVPDLTHFYKQYKSIQPYLQRETHPADGRENLQSIEDRAKLDGLYECILCACCSTSCPSYWWNQQEYLGPAVLMQAYRWLIDSRDEAGKLRKEMLQNSMSLYRCHTIMNCSRTCPKGLNPGKAIAEIKKQLAFD

SEQ ID NO: 1206 - protein, 439 aa, Pichia membranifaciens
  source 1..439: note = SBI01187_Isocitrate dehydrogenase
MLRTTVRAVNAGRFTPTFISSRSFSQNLSLLDKIKVKNPIVELDGDEMTRIIWQRIKDKLINPYLDVDLKYYDLGIQARDATDDQITIDAAEAIKKYGVGVKCATITPDEQRVEEFGLKKMWVSPNGTIRNILNGTVFRESIIIPRIPRLIPGWEKPIVIGRHAHGDQYKATDLVISEPGKLEMTFTPADPSSKPETKLIYNYKSPGVGLAMYNTDESIIGFAHSSFKMALTKNLPLYLSTKNTILKKYDGRFKDIFQEIYESTYKSEFESKGLWYEHRLIDDMVAQMIKSKGGYVMALKNYDGDVQSDIVAQGFGSLGLMTSVLMTPDGKAFESEAAHGTVTRHYRQHQQGKETSTNSIALIFAWSRGIAQRGRLDGTPAVVEFADALEKATIDTVQEDGIMTKDLALACGKTDRSSYVTTLEFLDAVADKLKNKVQV

SEQ ID NO: 1207 - protein, 520 aa, Pichia membranifaciens
  source 1..520: note = SBI01187_Aldehyde dehydrogenase 5
MFSTKINGSAVKRAVQTPLNRLYSQLALSVKVNLPNGTTYEQPTGLFINNEFVLPKQKKTFEVISPSTEEEITHVYEAREEDIDDAVDAAQTAFNSEWATGDPASRVTVLLKLADLIEQNAETLAHIESLDNGKSLQCSRGDVGLAAQCIRSAAGWADKINGSVVETGDSHFNYTRREPLGVCGQIIPWNFPLLMLAWKLAPALATGNTVVLKSAESTPLSALFMANLIKEAGIPAGVVNIVSGFGKIAGEAIATHQKIKKVAFTGSTATGRHIMKAAAESNLKKVTLELGGKSPNIVFDDADVSKAVQSLVAGIFYNTGEVCCAGSRIYVQEGIYDEVLSEFKAAAEAIKIGNPFDEDVFMGAQASYAQLTKILKFIEVGKNQGAKLITGGERLDNKGYFIKPTIFGDVTKDMDIVREEIFGPVVTIAKFSTVDEIVAIANDSNYGLAAGIHTTDVNKAIDVANRVKAGTIWVNTYNDFHQNVPFGGYGESGFGREMGQESLDNYTQVKAVRIGITKKN

SEQ ID NO: 1208 - protein, 675 aa, Pichia membranifaciens
  source 1..675: note = SBI01187_Acetyl-coenzyme A synthetase
MTQFVHQVAHEANDIKPRPTPKEFFERQPNKGHLETIDQYYELYNKSIQDPEGFFGPLAKELLHWDKDFSKVKNGSLKDGDVSWFLGGELNASFNCIDRHAFVNPTKPAIIYEADEEKDSSILTYGELLQQVCKVAGVLKSWGIKKGDTVAIYLPMTSQAIIAMLAVARLGAIHSVIFAGFSSGSIKDRVIDASCKALITCDEGRRGGRTVNIKKLCDEALNLCPSVENVLVFKRTGSEGIYMKEGRDFWWDEETAKFPGYLPPVPVNSEDPLFLLYTSGSTGTPKGVVHLTGGYLLGAALTTKYIFDVQPEDVFFTAGDVGWITGHTYALYGPLALGVPTIVFEGTPAYPDYGRLWQIVEKHKATHFYVAPTALRLLRKAGEQEIEKYDLSSLRTLGSVGEPISPDIWEWYNEKVGKGQCHISDTYWQTESGSHFIAPIAGITPNKPGSASLPFFGIETCIIDPVSGKEIEGNDVEGVLAVKSSWPSMARTVWNNHTKYMDTYLNPYPGYYFTGDGAARDNDGYYWIRGRVDDVVNVSGHRLSTAEIEAALIEHHGVSEAAVVGINDDLTGQAVIAFVSLKSEAPDAKEEEALFKLKKELILQVRTVIGPFAAPKHIVIVGDLPKTRSGKIMRRILRKVSAGEADQLGDITTLANPQSVAEIITAVDQQFFGKK

SEQ ID NO: 1209 - protein, 574 aa, Pichia membranifaciens
  source 1..574: note = SBI01187_Pyruvate decarboxylase isozyme
MPEQITLGRYLFEKIKEAGVHSIFGVPGDFNLALLDHVKEVEGIRWVGNANELNAGYEADGYSRVNGFACLVTTFGVGELSAVNAVAGAYAEHIPLIHVVGMPSISAEKQKLLLHHTLGDSRFDDFTTMSQKISIKLKVITEFDDAPKVINDLIETAILTKRPVYLGFPSNFSEALIPASDLTKYKLKLSLPPNNEESENEFVENVIQLMEKAKNPVILVDACASRHAVIEQVEEVARLTKFPVFTTPMGKGSFNEDNSEYYGMYIGALSAPDVKEIVESTDCIISIGGLLSDFNTGSFSYSYATTNVVEFHSNYCKFKRANYEDLQMKGALDNLISKLSKVSLSYQPKLSPPKSKYEYQTAKTCPEGPLIQEYMWKRVSYFLNEGDVVVTETGTSSFGILTTTFPKHVKAISQVLWGSIGFSLPAAVGANFAVDDFKKLNSSYPERRVILFIGDGSLQLTVQAISDACRWNIKPYIFILNNKGYTIEKLIHGPHESYNNIQPWKHDAILNLFADKVEYENLKVSTNEELDELFKNEKFNVPDKIRVIELMLDEFDAPSKLRLQAELSDKINSA

SEQ ID NO: 1210 - protein, 243 aa, Pichia membranifaciens
  source 1..243: note = SBI01187_Succinate dehydrogenase iron-sulfur subunit
MATAAAKTPNMKTFKIYRWNPDTPEVKPHMKAYDLDMNECGPMVLDALLKIKNEFDSSLTLRRSCREGICGSCAMNIGGRNTLACLCKLDKDSGKELKIYPLPHMYIVRDLVPDLTHFYKQYKSIQPYLQSDKPMPVRENLQSVEDRHKLDGLYECILCACCSTSCPSYWWNQQEYLGPAVLMQAYRWMVDTRDTATKARQAMLQNSMSLYRCHTIMNCSKTCPKGLNPGGAIAEIKKSMAFD

SEQ ID NO: 1211 - protein, 540 aa, Pichia membranifaciens
  source 1..540: note = SBI01187_Malate synthase
MPARLFVTSLDDVQVLGEVSDKPLLSEATPKDILTVDALKFVVMLHRAFNEKRKELLVNRQKVQEELDAGGSLHFLKETEYIRNDPNWRCAPNHPKLMSRKVEITGPPDAKMIVNAFNTDVHTYMTDFEDSCAPTWSNMLYGQVNLYDGIRDKIDFTNEQTGKHQEVGTWLMSHITVAGEPISASILDFGLFFFHNAKYLISQGLGPFFYLPKMEHWLEANLWNDIFCVAQDSLEIPRGTIKATVLIETLPISFQLDEVLYALKDHSAGLNCGRWDYMFSTIKRLRNQKEHILPDRQQVTMSVPFMTNYVKQLIKTCHKRGVHAMGGMAALIPIKDDPAANAVALEAVGKDKLREVLAGHDGTWIAHPGLLETALNVFETHMPTPNQIFVQKTDVVTEAELVDTNIKGGEITTKGLNANVYIGLNYMESWLRGLGCVPINHLMEDAATAEVARLQLWSWCKHQVTLQDTGKTVTPEYVSQLIDDEVAKCASKPGNKYAIAAKALKDELTGAKPLAEFLTDILYPYIATPGSPIDLATLKK

SEQ ID NO: 1212 - protein, 551 aa, Pichia membranifaciens
  source 1..551: note = SBI01187_Malate synthase
MSGPFPLVEDKIKGVQILAPIPANAKHIFNSEALGLVATLHRAFGAQRKKLLANRKEQQKLRDQGVLPDFLPETKYIRDDPTWTGPPLAKGLQDRRVEITGPTDRKMVINALNSPVATYMADFEDSLTPAWNNLVDGQVNLYDGVRRNLSFESNGKKYKLNLDPKRHIPTLIVRPRGWHLEEKHVLVDGEPISGGIFDFAIYFYNNAKESIAQGFGPYFYLPKMEHHLEAKLWNDIFNFSQDYIGLPRGTIRGSVLIETLPAAFQMDEIIYQLRQHIGGLNCGRWDYIFSYIKSLRNHPEFVLPERGQITMSVPFMASYVKLLVHTTHKRQVHALGGMAAQIPIKDDQERNRKALENVAKDKLREVNAGCDSCWVAHPALVPVVLKVFNEHMKGPNQINVPPKTPYKPITARDLLSPYVPDAKITEQGIRTNIIIGLSYIEAWLRNIGCVPINYLMEDAATAEVSRTQIWQWVTHGSKTDKGVTITKDLVSKLLNEEAGKLSKAAAPGNKFKQALEYFRPESLGEKYSDFVTTLLYDDVTTIGRPIAADKL

SEQ ID NO: 1213 - protein, 141 aa, Pichia membranifaciens
  source 1..141: note = SBI01187_Succinate dehydrogenase assembly factor 2
MLRFNKRFLSNSARRTLNYGKPQNPKHNAEISMKIEPIVRTGETIEVKRARLVYQSRKRGILESDLLLSRFAKKYLKTFSAEELEEYDKLLDEPDWDIYYWATKNYDVTPLPDKWKESKILKLLQEDAKNEGKEILTMPSL

SEQ ID NO: 1214 - protein, 413 aa, Pichia membranifaciens
  source 1..413: note = SBI01187_Succinate--CoA ligase subunit beta
MLSRTFARTARAVNQKRFLSLHEYRSAALLESYGVPVPKGYAATTPQGAFDAAKKLGTNELVIKAQALTGGRGKGHFDSGLQGGVKLISSAEEAKDLAEQMLNHKIITKQTGAAGKEVTAVYIVERRDALTEAYLAILLDRATQLPMIVASAQGGMDIEGVAAKDPDAIKTFSVDLEKGVTDAQGKEIASVLGYTDDAIPEAVVAIQNLYKVFKEKDCTQVEINPLSETPDHKVLAMDAKLGFDDNADFRQKDVFSWRDTTQEDPQEVEAAKYGLNFIKLDGNIANIVNGAGLAMATMDIVKLYGGEPANFLDCGGTATPQTIEKAFELILSDKKVNGIFVNIFGGIVRCDYVAEGLIAATKNFKLDIPVVVRLQGTNMQEAKKLIEESGLKLYAFEDLDPAAEKIVALAPKA

SEQ ID NO: 1215 - protein, 348 aa, Pichia membranifaciens
  source 1..348: note = SBI01187_Alcohol dehydrogenase
MSIPTTQKGVIFETNGGPLQYKDIPVPTPKANELLINVKYSGVCHTDLHAWKGDWPLDTKLPLVGGHEGAGVVVALGSNVQGWEIGDYAGIKWLNGSCMNCEFCERTNESNCAKADLSGYTHDGSFQQYATADAVQAAKIPKGTDLAQVAPILCAGVTVYKALKTANLKAGEWVALSGAGGGLGSLAIQYAKAMGYRVVAIDGGDEKGEFVKSLGAEVYVDFTKSKDIVGEIQKATGGGVHGAINVSVSEKAIDQSVLYTRSCGTVVLVGLPAGAKVSASVFDAVVRSITIAGSYVGNRADTSEAIDFFARGLIHCPIKIVGLSELPSIYTLMEQGKILGRYVVDTTK

SEQ ID NO: 1216 - protein, 631 aa, Pichia membranifaciens
  source 1..631: note = SBI01187_Probable succinate dehydrogenase flavoprotein
MLRQLRQFSTTRIARQTIGNDIKGTNLNSTKYLGQKYHVIDHEYDCIVVGAGGAGLRAAFGLAEAGFKTACISKLFPTRSHTVAAQGGINAALGNMHKDDWHWHMYDTVKGSDWLGDQDAIHYMTREAPKSIYELENYGVPFSRNEEGRIYQRAFGGQSKEYGKGGQAYRTCAVADRTGHALLHSLYGQSLRHNTHFFIEFFAMDLMMQDGACVGVVAYNQEDGTLHRFRAHKTVIATGGYGRAYFSCTSAHTCTGDGYAMVSRAGLPLEDLEFVQFHPTGIYGSGCLITEGSRGEGGFLVNSEGERFMERYAPSAKDLASRDVVSRAITMEINEGRGVGPEKDHMFLQLSHLPAAVLKERLPGISETAHIFAGVDVTKEPIPILPTVHYNMGGIPTKWNGEVVTQDPKTGEDVIVPGLLACGESACASVHGANRLGANSLLDLVVFGRAVAHTITDLLTPGTPLPPMPADLGKESIENLDKIRNASGPKATADIRLEMQKTMQKGCAVFRTQETLDEGLEKILAIDKTFKDVGVTDRSMIWNSDLVETLELQNLLTCATQTAKSATERKESRGAHARDDYPERDDVNWRKHTLSWQKEFGDDVVLGYRDVVKTTLDENECKPVPPAKRVY

SEQ ID NO: 1217 - protein, 447 aa, Pichia membranifaciens
  source 1..447: note = SBI01187_Malate synthase 1
MIVNALNTPVKTYMADFEDSTSPKWANLLNGQVNLYDAIRGQVDFVDPNTGKSYVVDKSPSRHIPTILVRPRGWHMVEKHLIIDGEPCSASIFDFGLYFFHNAKELIAKGHGPYFYLPKMEHHLEAKLWNDIFNVSQDILQISRGTVRATVLIETLPAAYQMEEILYQLRDHSSGLNCGRWDYIFSTIKTFKNRSDKILPDRGLVTMTVPFMSSYCKRLIEICHKRGVHAMGGMAAQIPIKNDVEANQIAMDKVTKDKLREVTMHHDGTWVAHPALATIANAIFDQYMPTPNQIFVTTTANISETDLSNTSIVGGTVTLAGIRQNIYIALCYIESWLRGVGCVPINYLMEDAATAEVSRLQLYSWVKNKVILDDCKAAITPELMESMLKEETAKLVQLASEGNKFEMAANSLLPEIRGDSISDFLTTLIYDNIVEAGAPIDLGTLKQ

SEQ ID NO: 1218 - protein, 640 aa, Pichia membranifaciens
  source 1..640: note = SBI01187_Probable succinate dehydrogenase flavoprotein
MYFAKHSASALSKRCFSISSRRSQVIGEGVKGKTTNAAKFVGENYHIVDHEYDCIVVGAGGAGLRAAFGLAEAGFKTACISKLFPTRSHTVAAQGGINAALGNVHKDDWHWHMYDTVKGSDWLGDQDAIHYMTREAPKAIYELEHYGVPFSRNSESRIYQRAFGGQTKEYGKGGQAYRTCAVADRTGHALLHTLYGQSLRHNTHFFIEFFALDLLMQDNECVGVIAYNQEDGTLHRFRAHKTVIATGGYGRAYFACTSAHTCTGDGYAMVARAGLPLEDMEFVQFHPSGIYGSGCLITEGARGEGGYLVNSEGERFMERYAPLAKDLACRDVVARAITMEINEGRGVGPDKDHMFLELSHIPAAVLKERLPGISETAHIFAGVDITKEPIPIIPTVHYNMGGIPTKWSGEVLTKDPSTGEDKVVPGLFACGEAACASVHGANRLGANSLLDLVVFGRAVSHTISEQLAPNTPFKTELSEDLGKKSIENLDRARNANGSKSTAEIRTSMQKTMQKGCAVFRTEETLQECVRNITKVDSAFSDVRTTDRSMIWNSDLVETLELQNLLACATQTAAAAAARKESRGAHAREDYPDRDDVNWMKHTLSYQKTGGSDVTLEYRDVISTTLDEKECKAVPPTIRAY

SEQ ID NO: 1219 - protein, 563 aa, Pichia membranifaciens
  source 1..563: note = SBI01187_Pyruvate decarboxylase isozyme
MSSITLGRYLFERLNQLQVQTIFGLPGDFNLSLLDKIYEVDGMKWAGNANELNAAYAADGYSRVKGLACLVTTFGVGELSALNGVAGAYAEHVGLLHVVGVPSILSQAKQLLLHHTLGNGDFTVFHRMSNNISQTTAFISDINSAPAEIDRCIREAYIYQRPVYVGLPANLVDLNVPASLLETPIDLSLKKNDPDAQEEVLESVLNLIKESSNPVILVDACASRHSCKKEVEQLVDLTQFPVVSTPMGKSGINEAHPRFGGVYVGTLSSPEVKELVESSDLILSVGGLMSDFNTGSFSYSYKTRSVVEFHSDYTKIKQATFPGVQMKETLQALIASVAPAVTQYSPVPVPKVKEVTSPAEPNTPLTQEWLWTKVSSWFQEGDIIITETGTSAFGIVQSKFPNNTVGISQVLWGSIGFTVGATLGAVMAAEEIDPNKRVILFVGDGSLQLTVQEISTMVKWETKPYLFVLNNDGYTIERLIHGMNATYNDIQPWNNLALLPLFNAKLYDAIRVSTTGEVDQLFNDAEFNKNSKIRMIEVMLPRMDAPSNLVKQAEITARTNAES

SEQ ID NO: 1220 - protein, 567 aa, Pichia membranifaciens
  source 1..567: note = SBI01187_Pyruvate decarboxylase isozyme
MSKISLGKYLFERIHQQDVGSIFGVPGDFNLTLLDKVYEVDGLEWRGNNNELNAAYAVDGYSRVKGFGAFVTTFGVGELSAINGTAGLFSEHVALIHIVGVPSISSQNNHLLLHHTLGNGDFTVFHKMASLVTHKSSVLTAGDTAVHEIDHIIREAIIHLKPCYLAFPANLVDYEVDASLLDTPLDLSLPPNDADAEEEVLSEVIDMISKAKKPVILVDSCTARHNCTVEAKQLILKTKFKFALTPMAKGAKDLYEDDENYTGIYVGDLSYPDVKEYVESADLILSLGAILSDFNTGSFSYSYSTKNLVEFHSDYIKIKSARYPDVQMKPTLQKLLTSQALDKVLTDFVPVPFDRKVRTLQELSPDAALTQEWLWTKLSSFLQEGDVVISETGTSSFGIIQTKFPKNVLGISQVLWGSIGYSVGAAFGAVVAAEEIDPHKRVLLFVGDGSLQLTVQEISAMSRNLKKPYLFVLNNDGYTIERLIHGETATYNDIQSWDHQKLLETFKAENAESLRISTVKEATELFEDKKFAKNDKIRLIEIMLGKMDAPANLVKQAERSAQTNAKN

SEQ ID NO: 1221 - protein, 337 aa, Pichia membranifaciens
  source 1..337: note = SBI01187_Malate dehydrogenase
MVKVAVLGAAGGIGQPLSLLVKLHPAVKQLSLFDVVNVPGVGADLSHICSDSQTTSHLPSSREDKTALASALKGSDLVIIPAGVPRKPGMTRDDLFNINAGIVKGLAEGIAENCPKAFVLIISNPVNSTVPIVTETLKKAGVYDPKRLFGVTTLDIVRANTFISQLYPDSTTPSQFNINVVGGHSGETIVPLYSLGNSKKYYNDLDEEKQKALIHRVQFGGDEVVQAKSGAGSATLSMAYAGYKLADSILKALTSSESIVECTFLNLDSTIKGAAEAKKLVNGLDFFSLPVKLGKNGIEEVQYEILNEISDNEKKLLSVAIEQLEKNIEKGVSFATK

SEQ ID NO: 1222 - protein, 366 aa, Pichia membranifaciens
  source 1..366: note = SBI01187_Alcohol dehydrogenase
MQVILQLIAIFRVSVTFYENNGELKYETIDVPTPKADEILINIKYSGVCHTDLHAWKGDWPLPVKFDPYCVGGHEGAGVVVAIGDNVKGWNLGDYAGIKWLNGSCMNCEECELSNESNCPEADLSGYTHNGSFQEYATGLAVQAAHIPKPEEGSEWYGKDDEYLAEVAPILCAGITVYKALKSADCKPGQWVAISGAAGGLGSLAVQYAKAMGLRVIGIDGGEGKEDLFKKCGGEIFVDFTKEKDVPAAINKATNGGAHGVISVSAAEAAISQSTQYVRTNGTIVLVGLPANAYCKSNVFEQVVRSYKIVGSYVGNRADTREALDFFERGLVRSPIKIVGLSELPRVFEEMAAGKILGRYVVDTTH

SEQ ID NO: 1223 - protein, 363 aa, Pichia membranifaciens
  source 1..363: note = SBI01187_Alcohol dehydrogenase
MAPKIPETQKAIVFYKNGGDLTYEDIKTPKPKPDEILINIKYSGVCHTDLHAWKGDWPLDVKLDPYLVGGHEGAGVVVAIGDNVKGWNLGDYAGIKWLNGSCMNCEECELSHESNCPEADLSGYTHDGSFQQYATGLAVQAAHIPKPEEGSKWYGKDDEYLAEIAPILCAGITVYKALKSSEAKPGQYVAISGAAGGLGSLAVQYAKAMGLVVVGIDGGEGKEELFKKVGGDVFIDFTKEKDVPKKILEVTKGGAHAVINVAVSEAAISQSTQYVRSNGTVVLVGLPANAYCKSNVFDQVVKSYKVVGSYVGNRADTREALDFFERGLVRSPIKIIGLSELPKVYEEMESGKILGRYVVDTSY

SEQ ID NO: 1224 - protein, 675 aa, Pichia membranifaciens
  source 1..675: note = SBI01187_Acetyl-coenzyme A synthetase
MPAEHLTLDHEGKLAPPKGFTERSLSKPNLPDFETYQKLYKESIENPSKFFGEKALETLSWSKKFDQTRYPESPKDDFKDGDIPAWFVGGELNASYNAIDRWAAKNPNKPAIIYEADEVNEGRIITYGELLKDVSKLAQALSKLGVKKGDSVAVYLPMIPEALVTLLAIVRIGAVHSVVFAGFSSTSLKDRILDADSRIVITADESKRGGKTIETKKIVDDALKDCPNVRNVIVFERTGNPHVPFQKGRDLWWHEEVAKYGPYFPPVPVNAEDPLFLLYTSGSTGKPKGVQHNTAGYLLGALLTTKYTFDVHEEDIIFTAGDIGWITGHTYVVYGPLLNGATTVVFEGTPAYPNYSRYWEIVDKYKINQFYVAPTALRLLKRAGTKHIEPYDLSSLRVLGSVGEPIAAEVWHWYNDNIGRGKAHIVDTYWQTESGSHLLTPLAGITSTKPGSASLPFFGIDAKILDPVTGEELTEANAEGVLAIKNAWPSITRGIFNDYARYIDTYLKPYPNYYFSGDGAARDADGFFWILGRVDDVVNVSGHRLSTAEIEAALIEHDLVAELAVVGYSDDLTGQAVAAYVSLKSTPANATADDLDAIRKELILTVRKEIGPFAAPKLILLVDDLPKTRSGKIMRRILRKILAGEEDQLGDISTLSNPAIVAHIIEVVKNSSKKK

SEQ ID NO: 1225 - protein, 416 aa, Pichia membranifaciens
  source 1..416: note = SBI01187_Isocitrate dehydrogenase
MFNIKPALLKQATKIKVKTPVVELDGDEMTRIIWDKIKKTLIHPYLDVDLKYYDLGIKKRDETNDQITKDSALAIKKYGVGIKCATITPDEQRVKEYNLKQMWKSPNGTIRNILGGTVFREPIIISNIPRLVSKWNKPIVIGRHAHADIYKCQDMIVPATGGSLDMVFTNAKTGEKQVIPVYDFKSGGVALSQYNTDESITGFAHSCFKTAIDKKMDLYFSSKNTILKKYDGRFKDIFEELYQTTYKTKFEELGIQYTHRLIDDMVAQMLKSEGGFVMALKNYDGDVISDILGQGFGSLGLMTSVLISPDGKSFESEAAHGTVTRHYYKHLNGEKTSTNSIASIFAWTRGLIKRGELDNTPDVVKFAKELERITIETVESGIMTKDLAIAKGTPNEFVDTDGFLDAVAKNLEKSIK

SEQ ID NO: 1226 - protein, 564 aa, Pichia membranifaciens
  source 1..564: note = SBI01187_Pyruvate decarboxylase isozyme
MSEITLGRYVFERIKQVGVNTIFGLPGDFNLSLLDKIYEVEGLRWAASLNELNAAYAADGYSRIKGLGVIITTFGVGELSALNGIAGAYAEHVGVLHIVGVPSLASQAKQLLLHHTLGNGDFDVFHRMSANISETTAMITDLAAAPAEIDRCIRTAYIAQRPVYLGLPANLVDLTVPAKLLDTKIDLALKANDAEAEDEVVETILSLIADAKNPVILSDACASRHNVKNEVKQLIDATQFPAFVTPLGKGSIDEKHPRFGGVYVGTLSSPEVKQSVESADLVLSVGALLSDFNTGSFSYSYQTKNIVEFHSDYIKIKNASFPGVQMKFVLEKLIAKVGAKIANYSPVPVPAGLPKNAPVADSTPLAQEWLWNELGEFLEEGDIVVTETGTSAFGINQTRFPTDAYGISQVLWGSIGYSVGAMVGATFAAEELDKAKRVILFVGDGSLQLTVQEIACLIRWGLKPYIFVLNNNGYTIEKLIHGPTAQYNMIQNWKHLDILPTFGATDYEAIPVKTVGEWKKLTTDPAFKKNSTIRLIEVFLPEMDAPSSLVAQANLTAAINAKQD

SEQ ID NO: 1227 - protein, 331 aa, Pichia membranifaciens
  source 1..331: note = SBI01187_Malate dehydrogenase
MFSVAKRSFSSSAASAYKVAVLGANGGIGQPLSLLLKLNHKVTDLALYDLRGAPGVAADVSHVPTNSTVKGYEQDAIKDALTGADVVVIPAGVPRKPGMTRDDLFNTNASIVRDLAKAVSENAPNAAVCIISNPVNSTVPIVAEVFKSKGTYNPNKLFGVTTLDVLRASRFVSEIGGTNPVNEKVTVVGGHSGNTIVPLLSQTNYKSLDTEVRDKLIHRIQFGGDEVVQAKNGAGSATLSMAQAGARFAGAVLNGLAGEKDVVEATFVDSPLFKDEGIEFFSSKVTLGPEGVKQIHGLGELSDHEEILVKEAKDTLIKNIQKGVDFVAQNP

SEQ ID NO: 1228 - protein, 337 aa, Pichia membranifaciens
  source 1..337: note = SBI01187_Malate dehydrogenase
MLQTTFSRRLFSQSMANQYKVAVLGASGGIGQPLSLQMKLNHKVSELRLYDLRLAKGVAADLSHIPTDSKVIGYSNDEPEGLAKALDNADVVLIPAGVPRKPGMTRDDLFSINAGIVRDLAEAVAKNCPNASICVISNPVNSTVPIVAKVLQKHGVYNPKKLYGVTTLDIIRASRFISEVEGTNPTQEKVNVVGGHSGITIIPLISQTNHKLMPKEVKDKLIHRIQFGGDEVVKAKDGAGSATLSMSYAGAVFADKVLDGLLGEKDVVVNSFVESPLYKEEGIDFFSSPITLGPEGVQKVHPIGEISSEEEALLAECKETLKKNIAKGYKFVEESKL

SEQ ID NO: 1229 - protein, 674 aa, Pichia membranifaciens
  source 1..674: note = SBI01187_Acetyl-coenzyme A synthetase
MSTNHVEVHEANGVSFRQAPEHFFKSQPSKSYIVDEAQYKAWYDQSINDPESFYGALAKEYLHWDKPFTKVRSGDLNNGDISWFLQGELNACYNCVDRHAFANPDKIALISEPDEESEAYSITFQQLLEKVCKVAGVLQSWGVKKGDTVAVYLPMTPEAVIAMLAIARIGAVHSVVFAGFSAGSLKDRVVDAGSKVVITCDEAKRGGKTINTKKIVDEGLNGVQSVSKILVFKRTGNPDVKMTPGRDYYWDEVCATQRSYVPCVPTNAEDPLFLLYTSGSTGQPKGVVHTVGGYLLNAALSTRFVFDLHPEDVFFTAGDVGWITGHTYALYGPLSLGTASIIFESTPAYPDYGRYWRIVNRWKATHFYVAPTAMRLIKKVGEAEIAKYDISSLRVLGSVGEPIQPDLWEWYNEKVGNNNCCIVDTYWQTESGAHLITPLAGAFPTKPGSASLPFFGIAPAIIDPATGKELEGNDVAGVLAIKSTWPSVARTVYNDHSRYMETYLKPFAGYYFTGDNAARDNDGYYWIRGRADDVVNVSGHRLSTNEIETVLDEHSGVTECACIGINDDLTGQAVVAFISLKDGACDITNESDFTVFKKSLVMEVRGVIGPFASPKAIIAVSDLPKTRSGKIMRRVLRKIASNEMEQLGDLSTMANPECVPKIIAAVDSQFFVKK

SEQ ID NO: 1230 - protein, 230 aa, Pichia membranifaciens
  source 1..230: note = SBI01187_Alcohol dehydrogenase
MGCEFCEQGAEPNCPKADLSGYTHDGSFQQYATADAIQAAHIAKGTDMAGVAPILCAGVTVYKALKTADLSAGQWVAISGAGGGLGSLAIQYGKAMGLRVLAIDGGDDKKQLCESLGAEVFVDFTKSKDIVKDIVDATGGGAHGVINVSVSEKAIAQSCQYARILGKVVLVGLPAGAQVKTPVFDAVVKSIQIKGSYSPIKVVGLSELPHVFEMMEQGKILGRMVLDTSK

SEQ ID NO: 1231 - protein, 334 aa, Pichia membranifaciens
  source 1..334: note = SBI01187_Alcohol dehydrogenase
MSAETTYEIPETQYGCIFYENGGPIEYKKIPVPKPKPTEILIKVLYSGVCHTDLHAWHGDWPLDVKLPLVGGHEGAGVVVAKGSNVTSFEIGDLAGIKWLNGSCMGCEFCEQGAEPNCPKADLSGYTHDGSFQQYATADAIQAAHIAKGTDMAGVAPILCAGVTVYKALKTADLSAGQWVAISGAGGGLGSLAIQYGKAMGLRVLAIDGGDDKKQLCESLGAEVFVDFTKSKDIVKDIVDATGGGAHGVINVSVSEKAIAQSCQYARILGKVVLVGLPAGAQVKTPVFDAVVKSIQIKGSYSPIKVVGLSELPHVFEMMEQGKILGRMVLDTSK

SEQ ID NO: 1232 - protein, 357 aa, Pichia membranifaciens
  source 1..357: note = SBI01187_Alcohol dehydrogenase
MTVDLGGKTMTVPETQKAIVFYKHGGPLEYTDIPVPSPKANEILVNVKFSGVCHSDLHAWKGDWPSKTILPLVGGHEGAGVVVAKGANVTNFEIGDYAGIKWLNKSCLCCEFCRKGAEIDCPKTVISGYAQNGTFQQYALADAVQAAQLPQNINLAEVAPILCAGLTVYKALKTAELLAGEWVVISGAGGGLGSMAVQYAKAMGLRVLAIDGGEEKGGLVKSLGAEIYIDFLEAKDLVSEVKEATMGGAHGVINVSVSPVAISQSCQYTRNGGKIIFVGLPPDAVCNTSVFDIVCKSLQIKGSSVGNREDTAQAVDFYIRGLIKSPIKIVGLSKIPEVFKLMEEGKISGRYVVDTSC

SEQ ID NO: 1233 - protein, 106 aa, Pichia membranifaciens
  source 1..106: note = SBI01187_Succinate--CoA ligase subunit alpha
MGGDPSPGTNFIDALTLFVNDPETEGIIMIGEIGGSAEEEAAEYLKQFNLTRDVPKPVVSFIAGVTAPPGRRMGHAGALISGGKGTAQSKIEALSAASQFVDRKLL

SEQ ID NO: 1234 - protein, 287 aa, Pichia membranifaciens
  source 1..287: note = SBI01187_Succinate--CoA ligase subunit alpha
MFTRSFHTSRLAKNYADTIKNLKVTKDTKQALDYGTQIVGGTNPKKAGEVHLGKPVFATVAEAMKETGATASGIFVPPPIAASAVAEAIEAEIPLVVCITEGIPQQDMLRISQMLKTQSKTRMVGPNCPGIIAPEQCKIGIMPQSIHKRGRIGIVSRSGTLTYEAVAQTTQVGLGQSLVIGMGGDPSPGTNFIDALTLFVNDPETEGIIMIGEIGGSAEEEAAEYLKQFNLTRDVPKPVVSFIAGVTAPPGRRMGHAGALISGGKGTAQSKIEALSAASQFVDRKLL

SEQ ID NO: 1235 - protein, 648 aa, Pichia membranifaciens
  source 1..648: note = SBI01187_Acetyl-coenzyme A synthetase
MTTTHSVVHEANGVVARPTPQPFFEKQPAKSLSSKTEYEAMYKQSIEDPEGFFGPMAKKFLSWDRDFTKVKSGTLENGDAAWFLGGELNACYNCVDRHAFATPDKTAIIFEADDESESKEISFSELLKEVSQVAGVLQSWGIQKGDTVAIYLPMTPEAIIAMLACARLGAVHSVIFAGFSAGSIKERVTDANSKVLITTDEGKRGGKTINNKKIVDEALKDCPSIEKVLVYKRTGNSAISMQAGRDFYWQDVAAEFRGYLPPVSVNSEDPLFMLYTSGSTGAPKGVVHSTGGDVGWITGHSYALYGPLALGVSTIIFEGTPAYPNFGRFWRIIERNKATHFYVAPTALRMLKKSGEDEIAKYDLSSLRTLGSVGEPIASEIWQWYDEKIGHGCCHISDTYWQTESGSHLIAPLAGAVPTKPGAATLPFFGIDAVIIDPTTGKVLEGNDVEGVLAVKSTWPSMARTVYKNHKRFMETYLKPYPGYYFTGDGAGRDHDGYYWIRGRVDDVVNVSGHRLSTAEIEAVLLEDSARVSEAAVVGINDDITGQAVIAFVQLKDNTVVNDDATLLKLRQDLRLSIRATIGPFAAPKTIIIVDDLPKTRSGKIVRRVLRKIVSGEAKALGDQSTLADPECIPQIVEAVEKQFGVKN

SEQ ID NO: 1236 - protein, 646 aa, Pichia membranifaciens
  source 1..646: note = SBI01187_Acetyl-coenzyme A synthetase
MPEKHLENEHLMNERAMDVPSGFLERHPGKPHLTSLEQYKKMHKESIEHPAQFFGKMAQENLSWSKPFTVAKVPEAPRLRDNNDPNKPAIIYEADEPNEGRIITFGELLKDVCRFAQVLKNLGVKKGDTVAVYLPMIPEAIVALMAIVRIGAVHSVVFAGFSSTSLKDRVLDADSKIVITTDESKRGGKIIETKKIVDDALTHCPDVRNVIVFKRTGNSHIPWNSKRDVWWHEEVVKYGPYCPPEPVSSEDNLFLLYTSGSTGKPKGILHTTAGYLLGAMLTTKYVFDVHYEDIIFTAGDVGWITGHSYVVYGPLLNGATTVVFEGTPAYPNFSRYWDIVDKYGVNQFYVAPTALRLLKRAGEKYIENYKLDTLRVLGSVGEPIAKDVWEWYNEFIGRGKAHICDTYWQTESGSHLICPLAGITPTKPGSASLPFFGIEPAICDPVTGEDLEGNCVEGVLCVKTAWPSMTRSIWNDYGRYLDTYLKPYHGYYFSGDGAARDQDGFYWILGRVDDVVNVSGHRLSTAEIEAALIEHPLVSENAVVGFPDELTGSAVAAFVSLKKEIDDVAATKKELVLTVRKEIGPFAAPKQIIIVDDLPKTRSGKIMRRILRKILAGEEDQLGDVSTLSNPNVVAHLIEVVHSMKK

SEQ ID NO: 1237 - protein, 410 aa, Pichia membranifaciens
  source 1..410: note = SBI01187_Isocitrate dehydrogenase
MPAEKIKVVTPVVDLDGDEMTRIIWKFIKDKLIFPYLDIDLKYYDLGIEYRDETDDKVTVDSAEAILKYGVGIKCATITPDEQRVKEFGLKKMWLSPNGTLRNILGGTVFREPIVIDNIPRIVPSWEKPIIIGRHAFGDQYKATDVIVPQAGKLQLVFKPEDGSEETVYNVYDFDGPGVALSMYNTDKSITDFAESSFKLALDRKMNLFLSTKNTILKKYDGRFKDIFESLYETKYKKDFDAAGIWYEHRLIDDMVAQMLKSKGGYIIAMKNYDGDVQSDIVAQGFGSLGLMTSVLTTPDGKAFEAEAAHGTVTRHYRQHQQGKETSTNSIALIYAWTRGLIQRGKLDNTPKVVEFAENLETAVIETVSKDNIMTKDLALAQGKTDRSSYVTTEEFIDAVANRLNKNLAK

SEQ ID NO: 1238 - protein, 175 aa, Pichia membranifaciens
  source 1..175: note = SBI01187_Mitochondrial membrane protein SHH3
MFMLRNPLLASLRSSYKPNTITNRLFSINKNLLQTPAKGQEILLKQRANRPISPHLTIYQPQITWYLSSVHRVSGVLLGAIFFGVSIAYGINKIYDFGLNDDSLVEFYKTNVPTWLDYTGKASVAYLFTFHFANGIRHLVWDKGSGFTIKGIYKGGYSVLAVCAVAGSYLFSKAF

SEQ ID NO: 1239 - protein, 324 aa, Pichia membranifaciens
  source 1..324: note = SBI01187_Succinate--CoA ligase subunit alpha
MLNRQFVRSFSSTKSVANYASTIKNLKVTKDTKVIYQGFTGKQATFHAEQAIAYGTQVVGGTNPKKAGQKHLDLPVFATVADAMKEAGATATGIFVPPSIAAGAIEEAIAAEIPLAVAITEGIPQHDMVRIAQILKTQSKTRLVGPNCPGLIAPDQCKIGIMPSHIHKRGKVGVISRSGTLTYEAVAQTTAVGLGQSLVIGMGGDPFPGTNFIDALTLFLQDEETEGIILIGEIGGTAEEEASEFLKKYNLTRPQGPKPVVSFIAGVSAPPGRRMGHAGAIVAGGKGDAKSKIAALQSAGVVVEESPARLGNSLLQEFKNKGLL

SEQ ID NO: 1240 - protein, 616 aa, Pichia membranifaciens
  source 1..616: note = SBI01187_NAD-dependent malic enzyme
MMMISHIRSYATKSVHTHTIKTPVGIKAALATLKPKTTRLSIEGPIECDLDGFQLLNSPVFNKGSAFTVEERTAFKLNGLLPAQVNTLDEQVDRAYSQFSYLKTPLAKNDFCTSMRIQNKVLYYELVRRHIREMLPIIYTPTEGDAIAAYSHRFRKPEGCFLSITDPDGIEDRLALYGEDKDIDYVVVSDGEGILGIGDQGVGGIRIAIAKLGLMTLCGGIHPGRVLPICLDVGTDNKELLNEELYMGNKFPRVRGEEYWTFVDKFIHALKKRFPSAVLHYEDFGVRTGRTMLHRYRETLPSFNDDIQGTGAVAMASMTAALKFSNRELLDSRVLIYGAGSAGIGIADQISNHMRLHGATEEEATSAIHCMDRQGLILDTHDYPTPAQKVYADKASEWEGVDTKSLLEVIKKVKPTVLVGCSTQPGAFTEEVIKEMYKHNKQPIVFPLSNPTRLHEAFPVDIMKWTDNNALIATGSPFPPVDGHVISENNNCFTFPGIGLGAVLSRCTTITDTMISAGVDQLASLSPKMEDPKNGLLPRLEEIDEVSAKVATAIILQALEEGTARVEEEERPNGGRVQVPRDFNKCLKWVQSQMWKPVYRPLVKVEHVPEIHTHQY

SEQ ID NO: 1241 - protein, 391 aa, Pichia membranifaciens
  source 1..391: note = SBI01187_Isocitrate dehydrogenase
MAFQKIQVKTPVVEMDGDEMTRIIWKMIKEQDETDDKVTVDSANATKKYGVAVKCATITPDEARVKEFNLKKMWLSPNGTIRNILGGTVFREPIIIENIPRIVEHWEKPIVIGRHAFGDQYKCQNIVTPECGGQLKLVFTPKDGSEEIVVPVYDFDGKGCALGMYNTEESIIGFAKASFALAVSRKLPLYMSTKNTILKQYDGLFKDTFERIYNAEYKEKFEALGIWYEHRLIDDMVAQMVKSKGGYIIAMKNYDGDVESDIVAQGFGSLGLMTSVLVSADGKSFEAEAAHGTVTRHYRQYQQGKETSTNSIASIFAWTRGLIKRGELDNTPAVVKFAETLEKATIDTVRVDGIMTKDLALARGETDRSSYVTTGEFIEGVAKRLTKELGA

SEQ ID NO: 1242 - protein, 266 aa, Pichia membranifaciens
  source 1..266: note = SBI01187_Succinate dehydrogenase iron-sulfur subunit
MSSVITKRITQITQLNSILVSKRFQSVAAPANLKTFKIYRWNPDTPEVKPKMQEYKVDMNNCGGMVLDALIKIKDEQDGTLTFRRSCREGICGSCAMNIDGRNTLACLCKIDSEKASSIKIYPLPHTHVVKDLVPDLTQFYKQYKSIQPYLQRKEFPKDGTEILQTVEDRKKLDGLYECILCACCSTSCPSYWWNAEEYLGPAVLMQSYRWMIDSRDEAKEKRKEMLQNSMSVYRCHTILNCTKTCPKGLNPGKAIAEIKKFLASA

SEQ ID NO: 1243 - protein, 564 aa, Pichia membranifaciens
  source 1..564: note = SBI01187_Pyruvate decarboxylase isozyme
MSEITLGRYVFERIKQVGVNTIFGLPGDFNLSLLDKIYEVEGLRWAASLNELNAAYAADGYSRIKGLGVIITTFGVGELSALNGIAGAYAEHVGVLHIVGVPSLASQAKQLLLHHTLGNGDFDVFHRMSANISETTAMITDLAAAPAEIDRCIRTAYIAQRPVYLGLPANLVDLNVPAKLLETKIDLALKANDAEAENEVVETILALVADAKNPVILSDACASRHNVKAEVKQLIDATQFPAFVTPLGKGSIDEKHPRFGGVYVGTLSSPEVKQSVESADLILSVGALLSDFNTGSFSYSYQTKNIVEFHSDYIKIKNASFPGVQMKFVLEKLIAKVGAKIANYSPVPVPAGLPKNAPVADSTPLAQEWLWNELGEFLEEGDIVVTETGTSAFGINQTRFPTDAYGISQVLWGSIGYSVGAMVGATFAAEELDKAKRVILFVGDGSLQLTVQEIACLIRWGLKPYIFVLNNNGYTIEKLIHGPTAQYNMIQNWKHLDILPTFGATDYEAIPVKTVGEWKKLTADPAFKKNSTIRLIEVFLPEMDAPSSLVAQANLTAAINAKQD

SEQ ID NO: 1244 - protein, 139 aa, Pichia membranifaciens
  source 1..139: note = SBI01187_Alcohol dehydrogenase
MGLRVLGIDGGAEKGDFDVVKDIQDATNGGPHGVINVSVSPAAISQSCQYVRTLGKVVLVGLPANAVCESPVFEHVVKSIQIRGSYVGNREDTAEALDFFSRGLVKSPIKVVGLSELPNIYKLMEQGKILGRYVVDTSY

SEQ ID NO: 1245 - protein, 376 aa, Pichia membranifaciens
  source 1..376: note = SBI01187_Alcohol dehydrogenase
MFSSAFRKQALRAARATRLQSTFAVPEKQMGVIFETHGGPLEYKEIPVPTPKPTEILINVKYSGVCHTDLHAWKGDWPLAAKLPLVGGHEGAGIVVAKGSAVRNFEVGDLAGIKWLNGSCMSCEFCEQGDESNCEQADLSGYTHDGSFQQYATADAIQAAKLPKGTDLAEVSPILCAGVTVYKALKTADLRAGQWVAISGAAGGLGSLAVQYAKAMGLRVLGIDGGDAKKGLFEQMGGDVFIDFTKYPREDPAKMIADIKAATNGLGPHGVINVSVSEAAISQSCEYVRSTGKVVLVGLPAGAVCKSEVFQHVVKSLQIKGSYVGNRADTREALEFFSDGKVKSPIKIVGLSQLPEVYSLMEQGKILGRYVVDTSK

SEQ ID NO: 1246 - protein, 334 aa, Pichia membranifaciens
  source 1..334: note = SBI01187_Malate dehydrogenase
MLSRASVRQFSSSASSAYKVTVLGAAGGIGQPLSLLMKLNHQVSNLALYDLRLGKGVATDLSHIPTNSTVEGFGPENDGLAKALKDADVVLIPAGVPRKPGMTRDDLFNTNASIVRDLAKAAAASAPNAALLIISNPVNSTVPIVSEVLKEKGVYNPKKLFGVTTLDVLRSSRFLSEVVGTNPATETVTVVGGHSGVTIVPLLSQTKHKDLPKDKYDALVHRIQFGGDEVVKAKDGAGSATLSMAQAGARMAGSVLKGLAGETDITEPTYIDNPLFKSEGVDFFSTRVTLGPEGVKEVHPLGNLSTAEEEMIATAKETLKKNIKKGVDFVKANP

SEQ ID NO: 1247 - protein, 261 aa, Talaromyces atroroseus
  source 1..261: note = SBI01292_Nitrilase
MAHNLAQCQVIVKKAVTAGAKALFLPEASDYIASSSAESVSLVRSVQQSEFVLGLQKEAKNARFPINVGIHEPAQGGIKVKNTLIWIDEHGEIAHRYQKIHLFDVEIKDGPVLKESASVEAGTQILPPFETPVGRVGLAICFDLRFPEISLALKRQNAQIITFPSAFTVPTGQAHWEALLRARAIETQSYVIAAAQAGPHNEKRISYGHSMIVNPWGQVVAQLGGDFEEPEIATADIDFDLIAKIRREMPLLRRTDVYPEI

SEQ ID NO: 1248 - protein, 275 aa, Talaromyces atroroseus
  source 1..275: note = SBI01292_Nitrilase
MVKVAIGQLCSTASMAHNLAQCQVIVKKAVTAGAKALFLPEASDYIASSSAESVSLVRSVQQSEFVLGLQKEAKNARFPINVGIHEPAQGGIKVKNTLIWIDEHGEIAHRYQKIHLFDVEIKDGPVLKESASVEAGTQILPPFETPVGRVGLAICFDLRFPEISLALKRQNAQIITFPSAFTVPTGQAHWEALLRARAIETQSYVIAAAQAGPHNEKRISYGHSMIVNPWGQVVAQLGGDFEEPEIATADIDFDLIAKIRREMPLLRRTDVYPEI

SEQ ID NO: 1249 - protein, 340 aa, Talaromyces atroroseus
  source 1..340: note = SBI01292_Malate dehydrogenase
MFAARQSFGVFQKRAFSASARQASKVTVLGAAGGIGQPLSLLMKLNPRVTQLALYDIRGGPGVAADLSHINTNSTVTGYDPTPSGLKEALTGTEIVLIPAGVPRKPGMTRDDLFNTNASIVRDLAKAAAEAAPNANILVISNPVNSTVPIVSEVFKAKGVYNPKRLFGVTTLDVVRASRFISQVKSTDPANEAVPVVGGHSGVTIVPLLSQSNHADIEGEARDALVNRIQFGGDEVVKAKDGAGSATLSMAFAGARFAESLLKAAQGVEGVIEPTFVDSPLYKDQGVDFFASRVELGPEGVKEILPVGKVNAYEEKLLEAALGDLKKNIKKGIDFVAQNP

SEQ ID NO: 1250 - protein, 408 aa, Talaromyces atroroseus
  source 1..408: note = SBI01292_Isocitrate dehydrogenase [NADP]
MASQAKIKVKSPVVELDGDEMTRIIWQDIKDKFIFPYLDIDLKYYDLGLEYRDQTEDKVTVEAAEAIKEYGVGVKCATITPDEARVKEFHLKKMWLSPNGTIRNILGGTVFREPIVIPNIPRLVPGWTKPIIIGRHAFGDQYRAADRLIPGEGTLELVYTPKGGEPERIKVYEFSGPGIAHTQYNTDDSIRGFAHSSFKMALLKGLPLYMSTKNTILKKYDGRFKDIFQEIYESDYRAQFEEKKLWYEHRLIDDMVAQMIKSEGGFVIAMKNYDGDVQSDIVAQGFGSLGLMTSTLATPDGSAFESEAAHGTVTRHYREHQKGRETSTNPIASIFAWTRGLIQRGKLDGTPELVAFAEKLEQACVDTVNIDEIMTKDLALARGRKDREAWVTTREYLEGVEKRLKSAL

SEQ ID NO: 1251 - protein, 498 aa, Talaromyces atroroseus
  source 1..498: note = SBI01292_Aromatic-L-amino-acid decarboxylase
MDREQFRAAAHAAIDDIINHFDSLPDRRVLPTIEPGYLRPQIPDSPPLEPEAWTEIQADIESKIQPGLTHWQSPNFMAFFPASVTYPSILGEMYSAAFTAPAFNWICSPACTELETVVMDWVAKALGLPGCFLSTSANGGGGVIQGTASESAATMLIAARERRARELTLAEGVQDGSAAYEDRICAHRSKLVALSSDQAHSSIAKAALVAGTRFRSVPARLEDNLEMTGEALRAVLTQLEERDGLVPFFITFTMGTTSSCAVDRFAELKAVLSEKESWRRIWVHIDAAYAGAALVADEYQHVAQHFAEGVDSFNTNMHKWLLVNFDASCLWVRNRIDLTNALDITPTYLRNPYSEQGTVIDYRNWQISLGRRFRSLKIWFVMRSYGLNGLKAHIRKGVALGDVFAQKVRGRPDLFEIVTRPAFGLTVLRVVTPGDEKGNEVTKQVYELINARGEIYITSSVIGGVYVIRVVSGSALAEDAHILRAFDILVKTTEEVLH

SEQ ID NO: 1252 - protein, 444 aa, Talaromyces atroroseus
  source 1..444: note = SBI01292_Succinate--CoA ligase subunit beta
MYKLARSRPIATALRATVESSIQSRFAAQQKRNLSIHEYLSANLLKTYGVGVPKGEVARTAEEAEAVAKSIGGDDMVIKAQVLAGGRGKGSFDNGLKGGVRVIYSPTEAKMFAEQMIGHKLITKQTGANGRLCNAVYIVERKFARREFYLAILMDRQTQSPVIVSSSQGGMDIETVAKESPDAIRTTPIDIKVGVTDEIARSIATDLGFSEQCIEDAKDTIQNLYKVFSEKDATQIEINPLSETSDHQVLAMDAKLGFDDNADFRQKEVFTWRDTTQEDADEVKAATHGLNFIKLDGDIGCLVNGAGLAMATMDIIKLNGGSPANFLDVGGGATPAAIKSAFDLITSDPKVTAIFVNIFGGIVRCDAIAQGLINVVGDMGLRTPVIARLQGTNMEQARKLIDESGLKIFCIEDLQSAAEKSVQFSKVVKLARDIDVGVEFTLGI

SEQ ID NO: 1253 - protein, 495 aa, Talaromyces atroroseus
  source 1..495: note = SBI01292_indole-3-acetaldehyde dehydrogenase
MSLSTSIQTPTVTFEQPLGLFINNQFVKGVKSQTFETVNPTTEKPIVAVHEGTAEDVDIVVKIAREAFEVWAEVTPSNRGRMLTKLADLFERDIETLAAIETLDNGKSLAMAKNDVRNAAGCLRYYGGWADKIIGQTIDTGTETLTYTRHEPIGVCGQIIPWNFPILIWAWKVGPAIAVGNTVIVKTAEQTPLSALYACKLIVEAGFPPGVINVISGFGRTAGAAISSHMDIDKVAFTGSTLVGRTILQAAATSNLKKVSLELGGKSPNIVFDDADIDNAISWSNYGIFYNHGQCCCAGSRLLVQEGIYDKFIARFKERASKNRVGDPFAPDTFQGPQISQLQFDRIMEYINHGKEEGATLALGGGRHGTEGYFIQPTVFTDVNSNMKIAQEEIFGPVIVVQKFKDEAEAIKIGNSSSYGLAAGVHTTNLNRAIRMSNALKAGTVWVNNYNMISYQAPFGGFKQSGFGRELGSYALENYTQIKAVVCRLTDAPFL

SEQ ID NO: 1254 - protein, 504 aa, Talaromyces atroroseus
  source 1..504: note = SBI01292_Aromatic-L-amino-acid decarboxylase
MYHRELNAFSQRLWDIVQQPPNTGVLPSADALSKARLTLLAHLPDRGQGLDRTKEHIVHDIIPAFNSSSLSPNYYGFVIGGVTPAALLADNVVSAYDQNVQVHMEEHSIATDVESKALGLVVDLLKLSRRAWHNGTFTTGATAANILGLACGREYVLRKAAEKRGAAIQSVGEHGIFEVMQAAGLSGIQVLSTLPHSSVGKAAGILGIGRANMKSINTSQKNLVEIDMALLEKELSRPDKASIVVISCAEVNTGHFATEGAAQMRELRRLCDKYDAWIHVDGAFGIFARILDASAEEYAAITRGCEGMELADSITGDAHKFLNVPYDCGIFLSRHASTEVAEDVFRNPNAAYLSAGPGKQSIPSPLNIGIENSRRLRALPVYASLMAYGRNGFKTILETHIRLARMIAGWLHDHPAYTPLPHAASEDDLCARTYTIVLFRANDDALNAQLTKKINATSKMYVSGTSWEGRPACRLAVSNWRAEVLRDFAVVTDVLEHVASNGKN

SEQ ID NO: 1255 - protein, 350 aa, Talaromyces atroroseus
  source 1..350: note = SBI01292_Alcohol dehydrogenase
MSIPEFQWAQVAEKIGGPLVYKQIPVPKPGPDQILVKIRYSGVCHTDLHAMMGHWPIPVKMPLVGGHEGAGVVVAKGSLVHEFDIGDHAGVKWLNGSCSECEFCRQADDPLCAHAQLSGYTVDGTFQQYTLAKASHASKIPKNVPLDAVAPVLCAGITVYKGLKESGLRPGQTVAIVGAGGGLGSLAQQYAKAMGIRVVAIDGGDEKRIMCEQLGTETYVDFTKSKDLVVDVKAATPDGLGAHAVILLAVSEKPFQQATEYVRSRGTIIAIGLPPNAFLKAPVLNTVLRMISIKGSYVGNRQDGVEALDFFARGLIKAPFKVAPLKELSNIFELMEKGQIAGRYVLEMPE

SEQ ID NO: 1256 - protein, 493 aa, Talaromyces atroroseus
  source 1..493: note = SBI01292_indole-3-acetaldehyde dehydrogenase
MALFQTIKTPVITYQQPLGLFINNEFVPGVAGRTFETINPHDEKPIVAVHEGDNKDVDLAVKAARKALEGEWKHVTPSERGRLLIRLADFLERDIEKVAAIEALDNGKSINMAKSDVTASARCFRYYGGWADKIYGQTIDTDSGSLTYTRHEPVGVCGQIIPWNFPILMFAWKIGPAIATGNTVVLKTAEQTPLSALYVATLIKEAGFLPGVINIISGFGRTAGAAIATHMDIDKVAFTGSTLVGRQIMRDAANSNLKKVTLELGGKSPNIVLPDANLEDAVEWVNLGIFFNHGQCCCAGSRILVHESIYDEFLALFKKRAEQNKVGNPFDPETFQGPQVSQVQYDRIMGYIADGINSGAKVITGGNRHGNEGYYIQPTIFTDVTEDMTIVKEEIFGPVCTVQKVRDEDEAIALANATNYGLAAAVHTTNINAAIRVSNAVKAGTVWVNNYNIFHYQMPFGGFKESGLGRELGAYALDNYTEIKTVRVHLSQS

SEQ ID NO: 1257 - protein, 350 aa, Talaromyces atroroseus
  source 1..350: note = SBI01292_Alcohol dehydrogenase
MSIPELQWAQVAEKKGGPLVYKQIPVPKPGPDEVLVKIRYSGVCHTDLHALKGDWPLPTKNDLVGGHEGAGIVVAKGELAKEFEIGDHAGIKWINGTCLACEFCKNADESVCPDALLSGYTVDGTFQQYAIGKAAHATKIAKNLPLDAVAPVLCAGITVYKGLKESGARPGQTIAITGGGGGLGSLAIQYAKAMGLRVIVIDGGDEKKTFCESLGAEAYVDFTKSKDIVEDVKAATPAGLGAHAVLLLAVAEKPFQQATEYVRPRGSVVAIGLPAGAFLRAPVFSTVVRMINIKGSYVGTRLDSEEAVDFFARGLIKAPFKTAPLKELPRIFELMEQGKIAGRYVLEMPE

SEQ ID NO: 1258 - protein, 330 aa, Talaromyces atroroseus
  source 1..330: note = SBI01292_Succinate--CoA ligase subunit alpha
MQAFRRNTLSALQNASKQRRTYVGASSAYASTIGNLRINSDTKVIYQGFTGKQGTFHAEQAIAYGTNVVGGTNPKKAGSQHLDRPVFATVSDAVKETGATASAIFVPPPLAAAGIEEAIAAEIPLVVCITEGIPQHDMVRITDILKTQNKTRLVGPNCPGIIAPGQCKIGIMPGFIHKRGRVGIVSRSGTLTYEAVNQTTQAGLGQSLVVGIGGDPFSGTNFIDCLKIFLEDEETDGIIMIGEIGGSAEEDAAEFLKTENKKNKPAVSFIAGISAPPGRRMGHAGAIVSGGKGGADSKISALEAAGVIVERSPASLGKTLLGEFVRRDLI

SEQ ID NO: 1259 - protein, 649 aa, Talaromyces atroroseus
  source 1..649: note = SBI01292_Probable succinate dehydrogenase flavoprotein
MSSLSLRSLAPASKISRALRDQRRNFSSTRPAARIFGSQPLRAKEASGPIAQKYPIIDHEYDAVVVGAGGAGLRAAFGLAEAGFNTACVSKLFPTRSHTVAAQGGINAALGNYSMHEDDWRWHMYDTVKGSDWLGDQDAIHYMTREAPASVRELEGYGCPFSRTEDGRIYQRAFGGQSQNYGKGGQAYRCAAAADRTGHALLHTLYGQSLRHNTNYFIEYFALDLLMEDGECRGIIAYNQEDGTLHRFKAHHTVLATGGYGRAYFSCTSAHTCTGDGMAMVARAGLPNQDLEFVQFHPTGIYGAGCLITEGSRGEGGYLLNSEGERFMERYAPTAKDLASRDVVSRSMTLEIREGRGVGPEKDHIYLQLSHLPAELLHERLPGISETASIFAGVDVTKEPIPVLPTVHYNMGGIPTRYTGEVVTLDENGNDKTVPGLYACGEAACVSVHGANRLGANSLLDLIVFGRAVSHRVRDIASPGKPHKELSADAGAQSIQDLDHARTADGPKSTFDIRNAMQKTMQTDVSVFRTQESLDDGVAKIKEVDALYSQVGTKDRSMIWNSDLVETLELRNLLTCATQTAHAAANRTESRGAHAREDYPDRDDEKWMKHTLTFQKTPHGEVDLTYRAVQDKTLDESECKPVPPFKRVY

SEQ ID NO: 1260 - protein, 572 aa, Talaromyces atroroseus
  source 1..572: note = SBI01292_Pyruvate decarboxylase
MASDIVTRELKQPINLVEYLYRRLHEVGIRSVQGVPGDYNLQALDYLPQCGLSWAGNCNELNAGYAADGYARVKGMAALITTFGVGELSTLNAIAGAYSEYVPIVHIVGQPSTASQRDGMLLHHTLGNGDYNVFADMSSRISCAMARLNDPLDAATLIDNAIRECWIQSRPVYITLPTDMVLKKVEGQRLETPIDLKRKPNDPEKEEYVVNLVLKYLHEAKDPVILVDACAIRHHVLPEVHDLVHKSGLPTFVAPMGKGAVNETHPNYGGVYAGEGSNNGVQKRVEQSDLILSIGAIKSDFNTAGFTYRIGQLKSIDFHSFLVRIRYSEYPNINMKGVLRKVTERLGKLNVGQIPHISNALPKRELDSSDQTITHAWLWPNVGQWLRENDIFITETGTANFGAWETRFPKGVVAINQTLWGSIGYSVGACLGAALAAEELKANQRTVLFVGDGSFQLTAQEVSTMLRKKLRPIIFVICNNGYTIERYIHGWNASYNDIQEWKFTDIPSTFGGQQGDYQTHQIRTRDELTNLFQDKDFSESKCLQLVELYVPQEDAPAALKSTAAASAKRNGA

SEQ ID NO: 1261 - protein, 319 aa, Talaromyces atroroseus
  source 1..319: note = SBI01292_Arylacetonitrilase
METVCVAVTQQEPEWLDLSASVAKTVHLIGEAASNQAKLITFPECWIPGYPAWIWSRAVDLSMARKYITNSLAYDSEEMRLICGAAKKSQIAVSLGFSERDGDSLYISQCIIDATGEILVRRRKLKPTHMERTMFGDASGRSLLNVAQLPFGRVGALACWEHIQPLLKYHTMTQREQIHVSAWPPLQAHSGGEAIWGMSMEGCLAQSQIYALESGTFVLHTTAVISQEAIKMMQCSDPLFGTPGGGASAVIGPDGRLLSTLMEPNKEGIIYAELNLADILTCRHFMDACGHYSRPDMLWLAVDRQEKMHSRSDVTHNRL

SEQ ID NO: 1262 - protein, 539 aa, Talaromyces atroroseus
  source 1..539: note = SBI01292_Malate synthase
MTTVETQLQGVSILGTVNNEHRKILTKEAVAFLALLHRTFNSTRKALLERRVIRQAEIDKGHLLDFLPETKHIRENDAWKGAPPAPGLVDRRVEITGPTDRKMVVNALNSDVWTYMADFEDSSAPTWENMINGQVNLYDAIRRQVDFKQGNKEYKLRTDRTLPTLIARARGWHLEEKHFTVDGEPISGSLFDFGLYFFHNARELVSRGTGPYFYLPKMESHLEARLWNDAFNLGQDYIGIPRGTIRATVLIETITAAFEMDEIIYELRDHSSGLNCGRWDYIFSFIKKFRQNANFVLPDRSAVTMTVPFMDAYVRLLIKTCHRRGVHAMGGMAAQIPIKDDPKANEVAMENVRKDKLREVRAGHDGTWVAHPALAGIASEIFNKHMPTPNQLFNRREEVNVTANDLLNTNVPGSITEEGIRKNLNIGLGYMEGWLRGVGCIPINYLMEDAATAEVSRSQLWQWVRHNVTTAEGKRIDKAYALRLLQEQAESLAQKAPKGNKYQLAARYFATQVTGEDYADFLTSLLYNEISSPGNAAKL

SEQ ID NO: 1263 - protein, 497 aa, Talaromyces atroroseus
  source 1..497: note = SBI01292_indole-3-acetaldehyde dehydrogenase
MALSQEITLPNGIKYEQPLGLFINNEFVKGVDGKTFETVNPHDEKVITSVHEATEKDVDIAVKVAREALDGPWKTLIPTERGRLLTKLADLFEEHKDIIAGIDTLDNGKATPFSKGDVQNASYCLRYYGGWCDKILGQTIDTDPNSLNYTIHEPIGVVGQIIPWNFPMLMWSWKIGPAIATGNTVVLKTAEQTPLSALYVATLIKKAGFPPGVVNIISGFGRVAGAAMSSHMDIDKIAFTGSTLVGRQILQAAAKSNLKKVTLELGGKSPNLVFPDADLENAISWINFGIYFNHGQCCCAGSRVLVHEAIYDKFLEAFKARANKNKVGDPFAEGTFQGPQVSQLQFDRIMGYIEDGKKGGAKVVTGGERLGTTGFYIKPTIFADVSGDMKIVQEEIFGPVCTVQKFKDEEEAIKLANATTYGLAAGIHTKDLNTTIRVANAIKAGTVWVNQYNNTHYQTPFGGYKESGIGRELGQYALENYTQVKAVRIYLGNSPFG

SEQ ID NO: 1264 - protein, 669 aa, Talaromyces atroroseus
  source 1..669: note = SBI01292_Acetyl-coenzyme A synthetase
MSDGAVLPPSAPVVAEAHQVDTFHVPEAFMAKHPTRPHLDGLEEYRKLYEESIRQPDIFWARMARDLLTFDHDFHTTRTGSLENGDNAWFLGGKLNASFNCVDRHAIKNPNKVAIIYEADEPSEGRTITYGELLREVSRVAWVLQSQGVRKGDTVAIYLPMIPEALVAFLACSRIGAVHSVVFAGFSSDSLRDRVLDAKSKFVITADEGKRGGKIIGTKKIVDEALKQCPEVTNVLVFKRTGADVPWTKGRDLWWHEEVEKYPNYLPPVSVDSEDPLFLLYTSGSTGKPKGVMHTTAGYLLGAAATGKYVFDIHDDDRYFCGGDVGWITGHTYVVYAPLLLGVATVVFESTPAYPNFSRYWDVIEKHKVTQFYVAPTALRLLKRAGDEHIHHKMEHLRVLGSVGEPIAAEVWKWYFESVGKEEAHIVDTYWQTETGSNIITPLGGVTPTKPGSASLPFFGIEPAIIDPVSGEEITGNDVEGVLAIKQAWPSMARTVWGAHKRYMDTYLNVYKGYYFTGDGAGRDHEGYYWIRGRVDDVVNVSGHRLSTAEIEAALLEHPMVAEAAVVGIADELTGQAVNAFVALKSGNESTDQVRKDLTMQVRKSIGPFAAPKAIIPVEDLPKTRSGKIMRRILRKILSGEEDSLGDTSTLSDPSVVGKITDAVHALRK

SEQ ID NO: 1265 - protein, 418 aa, Talaromyces atroroseus
  source 1..418: note = SBI01292_Nitrilase
MPKTLTVAVAQSRTLDSTASTLAALERTTRHAASRGVNILLFPEAYLGGYPRTCDFGTAVGYRNASGRDQFLAYFSSAIDLGDTPAGAGDDWVDRKLPVARERGKDRRGDGTRECLEEVARSTGVFIAVGLIEKAGGSLYCAVVYVDPKRGVLGKRRKVMPTASERLIWAQGSPSTLRAVATEINGVSLTIGAAICWENYMPLLRQSLYSQNVNLYLAPTADSRDTWLPLMRTVASEGRAVVLSANQCVRRSELPEWINAGSAAADKPEKKELITTSEGPHEIVWPQSAGDQLHPDKKRDQMYASLAVEDGDAAKDDPAKTASKPASPQDDYVSHGGSCIIGPLGEVIGGPIWDVCTDDSDPAVADNDPATTGDGLVIAKVDLEDCDRGRLDLDVAGSYSRNDAFKLTVEGLDLNPPP

SEQ ID NO: 1266 - protein, 303 aa, Talaromyces atroroseus
  source 1..303: note = SBI01292_Succinate dehydrogenase assembly factor 2
MSATHFIRSLRPALGNSSKLLPSLQQQSRAFGASALRANSRAPSTAKEHEEIQKKRPLNQHIPNTTSTQTNDFPKVGAANSPPEFLSSVDPNYKPADPYPGKIEHLTGGRESAGAQKPELEVGEMEGITFKVEPLKRQGEDASTMRARLLYQSRKRGILETDLLLSTFADVYLGKMNVEQLQQYDRFLDENDWDIYYWATQEPKEAEETAASSSGDAGSAVKVDTPTETWKQGAAKSGEWAQTVGAFKPAYRPLPSRWAESEVLALIRQHVQDKSATGFHAAKQRKRGGSGLGRMPDVKVFDS

SEQ ID NO: 1267 - protein, 545 aa, Talaromyces atroroseus
  source 1..545: note = SBI01292_Acetamidase
MATLAWEDIAADKRSRINKSIPSAWKIKSLPTERSVIDFPESCEILSVTELAITKMSATELVALLAQGKLKAVDVTLAFCKRAALAHQLVNCVHEFFPEAALAQAKSLDDYFESNKGPVGPLHGLPVSLKDQLRIKGVETSMGYISWLGKYETRDSILTSLLRKAGAVFFVKTSVPQTLMVCETINNIVGRTTNPRNRDLSCGGSSGGEGAIVAMRGAAMGVGTDIGGSIRIPSAFNFLYGIRPSHGRLPYAGMANSMEGQETVHSVVGPIAGSVDDLKLFVRSVLAQEPWKYDSKVIPLPWRESEENAITEKIRNGGLNVAVYSSDGNVLPHPPILRGIKKVRSALENCKHTVSTWTPYKHDLGVDLINKVYAADASTDVRRDINASGEPAIPNINNLLDPNIPKVDVNEVWDLQLQKWEYQCEYLEKWRELEQKMGKSLDAIICPISPTACIRHDKFRYYGYASIFNLLDFTSVVVPVMFADKKIDHSATNFKPLNELDAEVQAEYDPEAYHGAPVAVQVVGPRLSEERTLAIAREIGQLLGN

SEQ ID NO: 1268 - protein, 298 aa, Talaromyces atroroseus
  source 1..298: note = SBI01292_Succinate dehydrogenase iron-sulfur subunit
MAALRTSSRLLASARPRFTSSVFARSYATVDPISKVSEATSSSSKFVPESQTSTVQEPAPSQTPRTKTFHVYRWDPDQPSEKPRMQSYTLDLNKTGPMMLDALIRIKNEVDPTLTFRRSCREGICGSCAMNIDGVNTLACLCRIPTDTAKESRIYPLPHTYVVKDLVPDLTHFYKQYKSIKPYLQRDTKTEDGLEFRQSPEDRRKLDGLYECILCACCSTSCPSYWWNSEEYLGPAILLQSYRWLADSRDEKTEERKAALNNSMSVYRCHTILNCSRTCPKGLNPGKAIAEIKKMMAF

SEQ ID NO: 1269 - protein, 410 aa, Talaromyces atroroseus
  source 1..410: note = SBI01292_Isocitrate dehydrogenase [NADP]
MSDFAKIIVKNPVVELDGDEMTRVIWKNIKETFIHPYLDIDIKYYDLGLPYRDETSNQVVQDAAEAIKKYSVGIKCATITADEARLREFNLKQRWPSPNVAIRSAVGGTIFREPLIIPRVPRLVRNWKKPIVIGRHAFGDHSRAKERIMETAGKLEMVFTPEGGEPEVVEVYNYPERGGVGLAQYNTTNSIEDFANSSFEYALSRKMPLYFSTKNTVLKVYDGRFKDIFQELYETKYRKDFEAAGIFYEHRLIDDMVAYMIKSEGGMVMALKNYDGDIQSDIVAQGFGSLGLMTSVLISPDGRTFQSEAAHGTVTKHYREYQQGKETSTNPIASIFAWTRGLIKRGELDGTPDLVKFAEALEKACIDTVDIDGIMTKDLADACGNTEPGSWVMTNAFLSAVDKRLKSYLP

SEQ ID NO: 1270 - protein, 331 aa, Candida sp.
  source 1..331: note = SBI01679_Malate dehydrogenase
MFSVVKRSFSSSSASAYKVAVLGANGGIGQPLSLLLKLNHKVTDLALYDLRGAPGVAADVSHVPTNSTVKGYDPEGINEALSGADVVVIPAGVPRKPGMTRDDLFNTNASIVRDLAKAVSDNAPDAAVLIISNPVNSTVPIVSEVFKAKGTYNPKKLFGVTTLDVLRASRFVSEIGGTNPVNEKVTVVGGHSGNTIVPLLSQTNYKSLDTDVRDKLINRIQFGGDEVVQAKNGAGSATLSMAQAGARFAGAVLNGLAGEKDVVEPTFVDSPLFKDEGIEFFSSKVTLGPEGVKQIHGLGELSSHEEELIKEAKDTLIKNIKKGIDFVAQNP

SEQ ID NO: 1271 - protein, 833 aa, Candida sp.
  source 1..833: note = SBI01679_Protein PDC2
MGYNIKQKIEICLKAESNPSMTQGELAQWAMEQYGSEKAPSQTTISRILSSKNELIASKSADFLLVRRRKQLNPLLRRILTEWITQALWVGIPITTPIIQLTAHAIWTRLPMNEKDGNGVFSQKWCNHFIKKLNANLRGDDFDSMKNPGNYPLNKVWKLDEKLELKDYLKKLIELENYAPQDIFTLDEFQIFYSLPLDQIFDVSSIDKGLRQSSSSTENLVTIMLGTNIDGLEKLTPLIVGKYDTFDVTKSSQLPLTKLNEHQHHENGNGSGSNSTSSGSSGSAHNNTNTLMNKLTDVYNLYYKSNSNKWITSSMFQNYLLTLEHKLANHSPGRKIVILLDDSSSHRIINLKFSNIKLCYLKNESNHKNSSNSSVFNGVKFDYLPMSFGIIEEFKILYRLQQYLEMINIQRNMAKRNERGENENGHSKDGIDTKSNSPITTSSISQYKPDPSPTSTLSEADYDIPFIRVIEWIKRSWDSISSELIFLSWKKTHLINFTTQPWPTSDPMVAMRAKESLGPMQEKASVYNFSRSYEKLNEIMGYLNVVIPWKIDELLGLVNERGKVTLSYVSIEEIIGSCLLESSDKDKEDESSNAAARTGALPTPATNLTSAPELAVTTALESMAEPNGLISDWNPSVDPQFDMQYEYSNASNSLNINSLLAAAASLPQNSVDLFTKANANNTPNNLFNNSLVTPLSPMPAMTSIHTPGVAASNSTGGNFSQLNYGASNNNNAPYWQSSEKRRKVYPPQKSDPLSTPYEFRSPVKIPPMFNSKALTEVPTENLNGSSIVSKDIQLINSLTKLLDEGDGLQLSSTTLAELRANLNAVKARCSEKS

SEQ ID NO: 1272 - protein, 141 aa, Candida sp.
  source 1..141: note = SBI01679_Succinate dehydrogenase assembly factor 2
MLKFNKRFLSNTARRTLNYGKPQNPKHNLEITMKIEPIKRTGETIDVKRARLVYQSRKRGILESDLLLSRFAKKYLKTFSLEELDEYDKLLDEPDWDIYYWATKNYDVTPLPEKWQKSKILKLLQEDAKNKEKEILRMPNL

SEQ ID NO: 1273 - protein, 551 aa, Candida sp.
  source 1..551: note = SBI01679_Malate synthase
MSGPFPLVEDKLKGVQILAPIPASAKHIFSSEALAFVATLQRAFGGERKRLLANRKEQQKLRDQGVLPDFLPETKYIRDDPTWTGPPLAKGLQDRRVEITGPTDRKMVINALNSPVATYMADFEDSLTPAWNNLVDGQVNLYDGVRRNLSFESNGKKYKLNLDPKRHIPTLIVRPRGWHLEEKHVLVDGEPISGGIFDFAIYFFNSARESIAQGFGPYFYLPKMEHHLEAKLWNDIFNFSQDYIGLPRGTIRGSVLIETLPAAFQMDEIIYQLRQHIGGLNCGRWDYIFSYIKSLRNHPEFVLPERGQITMSVPFMASYVKLLVHTTHKRQVHALGGMAAQIPIKDDQERNRKALENVAKDKLREVNAGCDSCWVAHPALVPVVLKVFNEHMKGPNQINVPPKTPYKPVTARDLLSPYVPDAKITEQGIRTNIIIGLSYIEAWLRNIGCVPINYLMEDAATAEVSRTQIWQWVTHGSKTDKGVTITKELVSKLLNEEAGKLSKSAAPGNKFKQALEYFRPESLGEKYSDFVTTLLYDDVTTIGRPIAADKL

SEQ ID NO: 1274 - protein, 640 aa, Candida sp.
  source 1..640: note = SBI01679_Probable succinate dehydrogenase flavoprotein
MHFIRYSASVSKRRHFSISSRCFQVIGEGVKGKVTNAAKFVRESYHIVDHEYDCVVVGAGGAGLRAAFGLAEAGFKTACISKVFPTRSHTVAAQGGINAALGNMHKDDWHWHMYDTVKGSDWLGDQDAIHYMTREAPKAIYELEHYGVPFSRNTESRIYQRAFGGQTKEYGKGGQAYRTCAVADRTGHALLHTLYGQSLRHNTHFFIEFFALDLLMQDGECVGVIAYNQEDGTLHRFRSHKTVIATGGYGRTYFACTSAHTCTGDGYAMVARAGLPLEDMEFVQFHPSGIYGSGCLITEGARGEGGYLVNSEGERFMERYAPLAKDLACRDVVARAITMEINEGRGVGPERDHMFLELSHIPSAVLKERLPGISETAHIFAGVDITKEPIPIIPTVHYNMGGIPTKWNGEVITKNTETGKDQVVPGLFACGEAACASVHGANRLGANSLLDLVVFGRAVSHTIAEQLSPNTPFKSALPEDLGKESIENLDKCRNANGSKRTSEIRTAMQKTMQKGCAVFRTHETLQECSTNILKVDNMFSEVRTSDRSMIWNSDLVETLELQNLLTCATQTAAAAAARTESRGAHAREDFPDRDDVNWMKHTLSYQKRSGTKVELDYRDVISHTLDAKECKAVPPTVRAY

SEQ ID NO: 1275 - protein, 337 aa, Candida sp.
  source 1..337: note = SBI01679_Malate dehydrogenase
MVKVAVLGAAGGIGQPLSLLVKLHPAVKQLSLFDVVNVPGVGADLSHICSDSQTTTHLPSSREDKTALASALKGSDLVIIPAGVPRKPGMTRDDLFNINAGIVKGLAEGIAENCPKAFVLIISNPVNSTVPIVAETLKKAGVYDPKRLFGVTTLDIVRANTFISQLYPDSTTPSQFNINVIGGHSGETIVPLYSIGNSKKLYDDLDEEKQKALIHRVQFGGDEVVQAKSGAGSATLSMAYAGYKLADSILKALTSSDSIVECTFLNLDSSIKGAAEAKKLVNGLDFFSLPVLLGKNGIEEVKYEILNEVSDNEKKLLGVAIEQLLKNIEKGVEFATK

SEQ ID NO: 1276 - protein, 675 aa, Candida sp.
  source 1..675: note = SBI01679_Acetyl-coenzyme A synthetase
MPAEHLTLDHEGKHAPPKGFAERSLSKPNLPDFETYQKLYKESIENPSKFFGEQALNTLSWSKKFDQTRYPESPKDDFKNGDIPAWFVGGELNASYNAIDRWAIKNPNKPAIIYEADEVSEGRIITYGELLKDVSKLAQALTKLGVKKGDSVAVYLPMIPEALVTLLAIVRIGAVHSVVFAGFSSTSLKDRILDADSRIVITADESKRGGKTIETKKIVDDALKDCPNVRNVIVFERTGNLHVPFQKGRDLWWHEEVAKYGPYFPPVPVNSEDPLFLLYTSGSTGKPKGVQHNTAGYLLGALLTTKYTFDVHEEDIIFTAGDIGWITGHTYVVYGPLLNGATTVVFEGTPAYPNYSRYWEIVDKYKVNQFYVAPTALRLLKRAGTKHIEPYDLSSLRVLGSVGEPIAAEVWHWYNDNIGRGKAHIVDTYWQTESGSHLLTPLAGVTSTKPGSASLPFFGIDAKILDPVTGEELTEANVEGVLAIKNAWPSITRGIFNDYARYIETYLKPYPNYYFSGDGAARDADGFFWILGRVDDVVNVSGHRLSTAEIEAALIEHELVGELAVVGYSDDLTGQAVAAYVSLKSTPTNASSEDLDAIKKELILTVRKEIGPFAAPKLILLVDDLPKTRSGKIMRRILRKILAGEEDQLGDISTLSNPAIVAHIIEVVKNSSKKK

SEQ ID NO: 1277 - protein, 544 aa, Candida sp.
  source 1..544: note = SBI01679_Malate synthase 1
MTVQILAPISLEGLPTSQADILTKSALEFVVLLHRTFNGTRKELLLNRKKLQAEIDAGADLHFSNDSRITDSVWQGASPAPGLIDRRTEITGPPERKMIVNALNTPVKTYMADFEDSTSPKWSNLLNGQVNLYDAIRNQVDFVDSNTGKAYKVDRSPDRHIPTILVRPRGWHMVEKHLLIDGEPCSASIFDFGLYFYHNAKELIAKGHGPYFYLPKMEHHLEAKLWNDIFNVSQDILQIKRGTVRATVLIETLPAAYQMEEILYQLRDHSSGLNCGRWDYIFSTIKTFKNRPDKVLPDRGLVTMTVPFMLAYCKRLIEICHKRGVHAMGGMAAQIPIKNDPEANQVAMDKVTKDKLREVTMHYDGTWVAHPALATIANTIFNKYMPTPNQIYFTTIADVSELDLSNTTVVGGSVTLDGIRQNIYIALCYIESWLRGVGCVPINYLMEDAATAEVSRLQLYSWVTNKVVLDDAKVTITPELMESILKEETAKLVQLYGEGNKFQMAANALLPEIRGDSVSDFLTTMIYDNVVETGEIVSLESLKP

SEQ ID NO: 1278 - protein, 563 aa, Candida sp.
  source 1..563: note = SBI01679_Pyruvate decarboxylase isozyme
MSSITLGRYLFERLSQLQVQTIFGLPGDFNLSLLDKIYEVDGMKWAGNANELNAAYAADGYSRVKGLACLVTTFGVGELSALNGVAGAYAEHVGLLHVVGVPSILSQAKQLLLHHTLGNGDFTVFHRMSNNISQTTAFISDINSAPAEIDRCIREAYIYQRPVYVGLPANLVDLNVPASLLDTPIDLSLRRNDPDAQEEVLDSVLKLIKESTNPVILVDACASRHNCKAEVEKLVDLTQFPVVSTPMGKSGINENHPRFGGVYVGTLSSPEVKELVESSDLILSVGGLMSDFNTGSFSYSYKTKSVVEFHSDYTKIKQATFPGVQMKETLQALIAQVAPAVTQYSPVPVPKVKVINSPAEPNTPLTQEWLWTKVSSWFQEGDIIITETGTSAFGIVQSKFPNNTVGISQVLWGSIGFTVGATLGAVMAAEEIDPNKRVILFVGDGSLQLTVQEISTMVKWETKPYLFVLNNDGYTIERLIHGMNATYNDIQPWNNLALLPLFNAKLYDAIRVSTTGEVDQLFSDAEFNKNSKIRMIEVMLPRMDAPSNLVKQAEITARTNAEN

SEQ ID NO: 1279 - protein, 621 aa, Candida sp.
  source 1..621: note = SBI01679_NAD-dependent malic enzyme
MLSTKSQMFSQIRNYAGKSVHTHTIKTPVGIKAALATLKPKTTRLSIEGPIECDVDGFQLLNSPVFNKGSAFTAEERTAFKLNGLLPSQINTLDEQVDRAYTQFSYLKTPLAKNDFCTSMRIQNKVLYYELVRRHIREMLPIIYTPTEGDAIAAYSHRFRKPEGCFLSITDPDGIEDRLALYGEDKDIDYVVVSDGEGILGIGDQGVGGVRIAIAKLGLMTLCGGIHPGRVLPICLDVGTNNKELLEDDLYMGNKFPRVRGEEYWTFVDKFIHALKKRFPNAVLHYEDFGVTTGRTMLHRYRETLPSFNDDIQGTGAVAMASMTAALKFSNRDLLDSRVLIYGAGSAGIGIADQITNHMKLHGASEEHATSAIHCMDRQGLILDTHDYPTAAQKVYADKASDWEGIDTKSLLEVIKKVKPTVLVGCSTQPGAFTEEIIKEMYKHNKQPIVFPLSNPTRLHEAFPVDIMKWTDNNALIATGSPFQPVDGYVISENNNCFTFPGIGLGAVLSRCTTITDTMISAGVDQLASLSPKMADPKNGLLPRLEEIDEVSAKVATAIILQALEEGTARVEEEERPNGGRVQVPREFNKCVKWVQSQMWKPVYRPLVKVEHVPEIHTHQY

SEQ ID NO: 1280 - protein, 439 aa, Candida sp.
  source 1..439: note = SBI01679_Isocitrate dehydrogenase
MLRTTVRAVNAGRFTPALNFSRSFTQNSSLLDKIKVKNPIVELDGDEMTRIIWQRIKDKLINPYLDVDLKYYDLGIQARDATDDQITVDAAEAIKKYGVGVKCATITPDEQRVEEFGLKKMWVSPNGTIRNILNGTVFRESIIIPRIPRLIPGWEKPIVIGRHAHGDQYKATDLVISEPGKLEMTFTPADPSSKPETKVIYNYKSPGVGLAMYNTDESIIGFAHSSFKMALTKNLPLYLSTKNTILKKYDGRFKDIFQDIYDSTYKAEFESKGLWYEHRLIDDMVAQMIKSKGGYVMALKNYDGDVQSDIVAQGFGSLGLMTSVLMTPDGKAFESEAAHGTVTRHYRQHQQGKETSTNSIALIFAWSRGIAQRGRLDGTPAVVEFAEALEKATIDTVQEDGIMTKDLALACGKTDRSSYVTTIEFLDAVADKLKTKVQV

SEQ ID NO: 1281 - protein, 324 aa, Candida sp.
  source 1..324: note = SBI01679_Succinate--CoA ligase subunit alpha
MLNRQFVRSFSSTKSVSSYADTIKNLKVNKDTKVIYQGFTGRQATFHAEQAIAYGTQVVGGTNPKKAGQTHLGLPVFASVKDAIKEAGATATGIFVPPSIAAAAIEEAIEAEISLAVAITEGIPQHDMVRIAQILKTQSKTRLVGPNCPGLIAPDQCKIGIMPSSIHKRGKVGVISRSGTLTYEAVAQTTAVGLGQSLVIGMGGDPFPGTNFIDALTLFLEDKETEGIILIGEIGGTAEEEASEFLKKYNLTRPEGPKPVVSFIAGVSAPPGRRMGHAGAIVAGGKGDAKSKIAALQSAGVVVEQSPARLGNSLLQEFKNKGLL

SEQ ID NO: 1282 - protein, 380 aa, Candida sp.
  source 1..380: note = SBI01679_Alcohol dehydrogenase
MLRLLSIAPRTCSYRAATAPAFNAARFRFQSTYTIPKTQKAVVFETNGGPLEYRDIPVPKAKPNEILVNIKYSGVCHTDLHAWKGDWDLATKLPLVGGHEGAGVVVGLGENVVGWKLGDYAGVKWLNGSCMSCELCEEGHESNCSDADLSGYTHDGTFQQYCTADAIQAAKIPQGTDLAEVAPILCAGITVYKALKEADLKQGQWVAISGAGGGLGTLAVQYAKAMGFRVLAIDGGSDKGQLVKSLGAEEYIDFTTVPDVPKTAIEVSGGGPHAVINVSVSPQAMQQSTEFVRKTGTVVLVGLPAAASINALVFDTVVKCVTIKGSYVGNRADTREAIDFFARGLVKSPIKIAGLSELPKIFQEMEAGNILGRYVVDTSY

SEQ ID NO: 1283 - protein, 348 aa, Candida sp.
  source 1..348: note = SBI01679_Alcohol dehydrogenase
MSIPKTQKAVVFETNGGPLLYKDIAVPTPKDNEILINIKYSGVCHTDLHAWKGDWPLATKLPLVGGHEGAGVVVALGKNVKGWQIGDYAGVKWLNGSCLSCEYCQKSAESNCAEADLSGYTHDGSFQQYATADAIQAARIPKGTDLAEVSPILCAGITVYKALKTAALEAGQWVAISGAAGGLGSLAVQYAKAMGYRVIAIDGGEDKGKFVKELGAEYFVDFTKTKDVVKEIQTATNGGPHGVINVSVSEAAVNQSAQYVRPTGTVVLVGLPAGAKISAPIFDSVVKSINIRGSYVGNRADTAEAIDFFARGLIKCPIKIVGLSELQNIYELMEQGKILGRYVVDTSK

SEQ ID NO: 1284 - protein, 411 aa, Candida sp.
  source 1..411: note = SBI01679_Isocitrate dehydrogenase
MPADKIKVVTPVVDLDGDEMTRIIWKFIKDKLIFPYLDIDLKYYDLGIEYRDETDDKVTVDSAEAILKYGVGIKCATITPDEQRVKEFGLKKMWLSPNGTLRNILGGTVFREPIVIDNIPRIVPAWEKPIIIGRHAFGDQYKATDVIVPKAGKLQLVFKPDDGSEESVYNVYDFDAPGVALAMYNTDKSITDFAESSFKLALDRKLNLFLSTKNTILKKYDGRFKDIFEGLYESKYKKEFDAAGIWYEHRLIDDMVAQMLKSKGGYIIAMKNYDGDVQSDIVAQGFGSLGLMTSVLTTPDGKAFEAEAAHGTVTRHYRQHQQGKETSTNSIALIYAWTRGLIQRGKLDNTPDVVEFAENLEKAVIETVSKDNIMTKDLALAQGKVDRSSYVTTEEFIDAVANRLNKNLGRA

SEQ ID NO: 1285 - protein, 520 aa, Candida sp.
  source 1..520: note = SBI01679_Aldehyde dehydrogenase 5
MFSSKINGNLVKRAAAAPLNRLYSQLALSVNVNLPNGTSYEQPTGLFINNEFVLPKQKKTFEVISPSTEEEITHVYEAREEDIDTAVEAAQAAFNSEWATGDPAARVKALLKLADLIDQNAETLAHIESLDNGKSLQCSRGDVALSSQCIRSAAGWADKINGSVVETGDSHFNYTRREPLGVCGQIIPWNFPLLMLSWKLAPALATGNTIVLKSAESTPLSALYMANLIKEAGIPAGVVNIVSGFGKIAGEAIATHQKIKKVAFTGSTATGRHIMKAAAESNLKKVTLELGGKSPNIVFDDANVSKAVQSLVAGIFYNTGEVCCAGSRIYVQEGIYDQVLSEFKAAAESIKIGNPFDEDVFMGAQASYAQLTKILKFIEIGKNQGATLITGGERVDNKGYFVKPTIFGDVTKDMDIVKEEIFGPVVTISKFKTVDEIVDVANDSNYGLAAGVHTEDINKAIDVANRIKSGTIWVNTYNDFHQSVPFGGYGESGFGREMGQESLDNYTQVKAVRIAINKKN

SEQ ID NO: 1286 - protein, 630 aa, Candida sp.
  source 1..630: note = SBI01679_Probable succinate dehydrogenase flavoprotein
MLRQLRQFSSTRVVRQTIGNDIKGSTLNSTKYLGQKYHVIDHEYDCVVVGAGGAGLRAAFGLAEAGFKTACISKLFPTRSHTVAAQGGINAALGNMHKDDWHWHMYDTVKGSDWLGDQDAIHYMTREAPKSIYELENYGVPFSRNEEGRIYQRAFGGQSKEYGKGGQAYRTCAVADRTGHALLHSLYGQSLRHDTHFFIEFFAMDLMMQDGACVGVVAYNQEDGTLHRFRAHKTVIATGGYGRAYFSCTSAHTCTGDGYAMVSRAGLPLEDLEFVQFHPTGIYGSGCLITEGSRGEGGFLVNSEGERFMERYAPSAKDLASRDVVSRAITMEINEGRGVGPEKDHMFLQLSHLPAAVLKERLPGISETAHIFAGVDVTKEPIPILPTVHYNMGGIPTKWNGEVLTQDENGKDQVVPGLLACGESACASVHGANRLGANSLLDLVVFGRAVAHTITDLLTPGTPLPPMPADLGKESIENLDKIRNASGSKTTAEIRLEMQKTMQKGCAVFRTQETLDEGLEKILAIDKTFKDVGVTDRSMIWNSDLVETLELQNLLTCATQTAKSATERKESRGAHARDDYPDRDDVNWRKHTLSWQKGFGDDVTLGYRDVVKTTLDENECKPVPPAKRVY

SEQ ID NO: 1287 - protein, 348 aa, Candida sp.
  source 1..348: note = SBI01679_Alcohol dehydrogenase
MSIPTTQHAVVFETNGGPLEYKEIAVPTPKPNELLINVKYSGVCHTDLHAWKGDWPLPTKLPLVGGHEGAGVVVAMGSNVQGWEIGDYAGIKWLNGSCMNCDFCERTFEPNCEKADLSGYTHDGSFQQYATADAVQAAKIPKGTDLAHVAPILCAGVTVYKALKTAKLSAGQWVALSGAGGGLGSLAIQYAKAMGYRVVAIDGGEEKGEFVKSLGAEVYVDFTKSKDIVGEIRKATGGGVHGAINVSVSEAAIDQSVQYTRSCGTVVLVGLPAGAKVTAGVFDAVVRSITIAGSYVGNRADTSEAIDFFARGLINCRIKVVGLSELPSIYALMEEGKILGRYVVDTSK

SEQ ID NO: 1288 - protein, 413 aa, Candida sp.
  source 1..413: note = SBI01679_Succinate--CoA ligase subunit beta
MLSRTFARTARAVNQKRFLSLHEYRSAALLESFGVPVPKGYAATTPQGAFDAAKKLGTNELVIKAQALTGGRGKGHFDSGLQGGVKLISSAEEAKDLSEQMLNHKIITKQTGAAGKEVTAVYIVERRDALTEAYLAILMDRATQAPMIVASAQGGMDIEGVAAKDPDAIKTFTIDLEKGVTDAQGKDIASVLGYTDAAIPEAVTAIQNLYKVFIEKDCTQVEINPLSETPDHKVLAMDAKLGFDDNAEFRQKDVFGWRDTTQEDPQEVEAAKYGLNFIKLDGNIANIVNGAGLAMATMDIVKLYGGEPANFLDCGGTATPETIEKAFELILSDKKVNGIFVNIFGGIVRCDYVAEGLIAATKNFKLDIPVVVRLQGTNMNEAKKLIEESGLKLYAFEDLDPAAEKIVALAPKA

SEQ ID NO: 1289 - protein, 215 aa, Candida sp.
  source 1..215: note = SBI01679_Succinate dehydrogenase iron-sulfur subunit
MQSYEVDLNKCGPMVLDAILKIKNEQDSTLTFRRSCREGICGSCAMNIGGTNTLACLCRIDTDTNKDLKIYPLPHMFIVRDLVPDLTHFYKQYKSIQPYLQRETHPADGRENLQSIEDRAKLDGLYECILCACCSTSCPSYWWNQQEYLGPAVLMQAYRWLIDSRDEAGKLRREMLQNSMSLYRCHTIMNCSRTCPKGLNPGKAIAEIKKQLAFD

SEQ ID NO: 1290 - protein, 265 aa, Candida sp.
  source 1..265: note = SBI01679_Succinate dehydrogenase iron-sulfur subunit
MFRNLLRSNSFAPVVRSSARTLATEASVPARLKTFQIYRWSPDTPEIEPKMQSYEVDLNKCGPMVLDAILKIKNEQDSTLTFRRSCREGICGSCAMNIGGTNTLACLCRIDTDTNKDLKIYPLPHMFIVRDLVPDLTHFYKQYKSIQPYLQRETHPADGRENLQSIEDRAKLDGLYECILCACCSTSCPSYWWNQQEYLGPAVLMQAYRWLIDSRDEAGKLRREMLQNSMSLYRCHTIMNCSRTCPKGLNPGKAIAEIKKQLAFD

SEQ ID NO: 1291 - protein, 675 aa, Candida sp.
  source 1..675: note = SBI01679_Acetyl-coenzyme A synthetase
MTQSVHQVAHEANDVKPRPTPAEFFERQPNKGFLNSIDHYHEMYNKSIQDPEAFFGPLAKELLHWDKDFTKVKNGSLNDGDVSWFLGGELNASFNCIDRHAFVNPTKPAIIYEADDEKDSSILTFGQLLQQVCKVAGVLKSWGVKKGDTVAIYLPMTSQAIIAMLAVARLGAIHSVIFAGFSSGSIKDRVNDASCKALITCDEGRRGGRTVNIKKLCDDALTQCPSVEKVLVFKRTGSEGIYMKEGRDFWWDEETAKFPGYLAPVPVNSEDPLFLLYTSGSTGTPKGVVHLTGGYLLGAALTTKYIFDVQPEDVFFTAGDVGWITGHTYALYGPLALGVPTIVFEGTPAYPDYGRLWQIVEKHKATHFYVAPTALRLLRKAGEQEIEKYDLSSLRTLGSVGEPISPDIWEWYNEKVGKGQCHISDTYWQTESGSHFIAPIAGITPNKPGSASLPFFGIETCIIDPVSGKEIEGNDVEGVLAVKSSWPSMARTVWNNHTKYMDTYLNPYPGYYFTGDGAARDNDGYYWIRGRVDDVVNVSGHRLSTAEIEAALIEHHGVSEAAVVGINDDLTGQAVIAFVALKDENAEAREEEALLKLRKELILQVRTVIGPFAAPKYIVIVADLPKTRSGKIMRRILRKVSAGEADQLGDITTLANPQSVAEIIKAVDQQFFGKK

SEQ ID NO: 1292 - protein, 335 aa, Candida salmanticensis
  source 1..335: note = SBI01681_Malate dehydrogenase
MVKVTVCGAAGGIGQPLSLLLKLNPQVTQLSLFDVVNVPGVSADLSHINSGATTKSFLPSSKEDKTALAESLKGSDLVVIPAGVPRKPGMTRDDLFNINASIVQGLAQGIAENAPDAFVLIISNPVNSTVPIVAETLKKNNVFNPAKLFGVTTLDIVRANTFISQLFADETKPTDFEVPVVGGHSGETIVPLYSVGAKSYYNKLSAEQKKELIHRVQFGGDEVVQAKNGAGSATLSMAYAGYRLAESLLDAAQGRSVTECTFLNLDSSIKGAAEAKKLVNNLDYFSLPVTLSKAGIAEVQYDILTKINDDEKKLLEVAIGQLSGNIDKGVSFVKK

SEQ ID NO: 1293 - protein, 331 aa, Candida akabanensis
  source 1..331: note = SBI01681_Malate dehydrogenase
MFKVASRSFSSSPSAAFKVAVLGAGGGIGQPLSLLLKLNHKVTDLALYDLRGAPGVAADVSHVPTNSTVKGYEPEGLKDALTGADVIVIPAGVPRKPGMTRDDLFNTNASIVRDLAKAAAEYAPNAALAIISNPVNSTVPIVAEVFKSKGVYNPKKLFGVTTLDVLRASRFVSEVAGTNPVNEKVTVVGGHSGITIVPLLSQTTHKNLPEDQRDALIHRIQFGGDEVVQAKNGAGSATLSMAQAGARFTGSLLNGLSGEKDVVEPTFVDSPLFKDEGVEFFSSKVTLGVDGVQTVHPLGELSDHEEELVKKAKETLIGNIKKGVDFVAQNP

SEQ ID NO: 1294 - protein, 519 aa, Candida akabanensis
  source 1..519: note = SBI01681_Aldehyde dehydrogenase 5
MLRTTTFARASLARSMAPAMVRLYSNLPLSVPITLPNGTTYEQPTGLFINNEFVLPKQKKTFEVISPSTEEEITHVYEAREEDVDAAVNAAQAAFDGGWSNADPAVRSAALNKLADLIEENAETLAFIEAMDNGKSILNARGDVALSVACFRNTAGWADKILGSIIETGDSHFNFTRREPLGVCGQIIPWNFPLLMFTWKVGPAVATNNTIVLKTSETTPLSALYVCKLIQENNVFPPGVLNVVSGFGKITGNAITDHPKIKKVAFTGSTATGKHIMSKCSNTLKKVTLELGGKSPHIVFSDANLDVAVQNIITGIFYNSGEVCCAGSRLYIQEDIYDEFVAKFVAAANDVKVGNPFDEDVLQGAQNSWNQLSKILGFIEDGKKEGATLLTGGHRREGKGFFVEPTVFGDVTEDMKIVKEEIFGPVITVHKFKDADEAVKLANNSQYGLAAGIQTSNINTAIDVSRRVKAGTVWVNTYNDFHQMVPFGGFGASGIGREMGKEVLENYTQTKAVRIAILK

SEQ ID NO: 1295 - protein, 629 aa, Candida akabanensis
  source 1..629: note = SBI01681_Probable succinate dehydrogenase flavoprotein
MLRSIRNFSTSRVAKQVIGSAKGETVNATKYLGQKYHVIDHEYDCVVVGAGGAGLRAAFGLAEAGFKTACVTKLFPTRSHTVAAQGGINAALGNMHKDDWHWHMYDTVKGSDWLGDQDAIHYMTKEAPDSIYELENYGVPFSRNEEGRIYQRAFGGQSKDYGKGGQAYRTCAVADRTGHALLHSLYGQSLRHDTHFFIEFFAMDLLMENGECVGITAYNEEDGTLHRFRAHKTVLATGGYGRAYFSCTSAHTCTGDGYAMASRAGLPLQDLEFVQFHPSGIYGSGCLITEGARGEGGYLINSEGERFMERYAPHAKDLASRDVVSRAITMEINEGRGVGPEKDHMYLQLSHIPADILKARLPGISETAHIFAGVDVTKEPIPILPTVHYNMGGIPTKYTGEVLKKNEKGEDEVVPGLLACGEVACASVHGANRLGANSLLDLVVFGRAVSHTIRDSLTPGTPLRPVSKDIGLESIANFDKLRNADGSKSTAEIRLAMQKTMQKGCAVFRIQDTLDECVKNINEVDETFKHVKTTDRSMIWNSDLVETLELQNLLTCATQTAASAAARPESRGAHARDDFPERNDVDWMKHTLSYQSEFGAPVTLDYRDVISHTLDEADCKSVPPGKRVY

SEQ ID NO: 1296 - protein, 409 aa, Candida akabanensis
  source 1..409: note = SBI01681_Isocitrate dehydrogenase
MVEKITVKNPIVEMDGDEMTRIIWQFIKDKLIFPYLDVDLKYYDLGIEYRDETDDKVTTDAAEAILKYGVGVKCATITPDEARVKEFNLKKMWLSPNGTLRNILGGTVFREPIVIDNIPRIVPTWEKPIIIGRHAFGDQYKATDIVVPAAGKLQLVFTPDDGSGAQVHEVYHYDAPGVALSMYNTDASITDFAESSFRMALDRKMNLFSSTKNTILKKYDGRFKDIFEGLYASKYKKEFDAAGIWYEHRLIDDMVAQMLKSKGGYIIAMKNYDGDVQSDIVAQGFGSLGLMTSVLVTPDGKAFEAEAAHGTVTRHYRQHQQGKETSTNSIASIFAWTRGLIQRGKLDDTPAVVEFGENLEKAVIDTVALDSVMTKDLALAQGKTDRSSYVTTEEFIDAVQTRLNKNLGY

SEQ ID NO: 1297 - protein, 141 aa, Candida akabanensis
  source 1..141: note = SBI01681_Succinate dehydrogenase assembly factor 2
MLKRSSRQFSVSTRTCLNFGKPQNPSYNELASRIEPIKRSGESIEVKRARLTYQARKRGILESDLLLSRFAKKHLHTLSMEQLDEFDLLLDEADWDIYYWASGNYDVTPLPEKWKNSEILKLLQTDTQNNKGEILRMPDLH

SEQ ID NO: 1298 - protein, 551 aa, Candida akabanensis
  source 1..551: note = SBI01681_Malate synthase
MSSPFPTVALKLQGVQILGPVPSEAKHIFNPEALALVATLHRNFQGQRKKLLANRKEQQKLRDSGVLPDFLPETEYIREDPTWTGPPLAPGLQDRRVEITGPTDRKMVINALNSGVATYMADFEDSLTPAWANLVDGQVNLYDGVRRNLSFSSNGKQYKLNLDKGRHIPTLIVRPRGWHLDEKHVLVDGEPVSGGIFDFAIYFYNNAKETLARGFGPYFYLPKMEHHLEAKLWNDIFNQAQDYIGIPRGTIRGSVLIETLPAAFQMDEIIYQLRQHIGGLNCGRWDYIFSYIKSLRNHSEFILPDRSQVTMTAPFMASYVKLLVHTCHKRQVHALGGMAAQIPIKEDEKRNKAALENVAKDKLREVMAGCDSCWVAHPALVPVVLKVFNEHMKGPNQINVPPRKPYTPVTARDLLSPFVPDAKITEQGIRTNCIIGLSYIEAWLRNVGCVPINYLMEDAATAEVSRTQLWQWVTHGAHTDAGKLIDKAYVSKLLDEEYGKLSKSGKPGNKFKAAYNYFKPEALGEKYSDFVTTLIYDDVTTVGRPVPAEKL

SEQ ID NO: 1299 - protein, 558 aa, Candida akabanensis
  source 1..558: note = SBI01681_Malate synthase 1
MVYSSLDNVEVRAPISAKPEYDSGTSQADILTQSALSFVVLLHRAFNATRKELLDNRQKVQAQLDAGKPLDFLQDADLVKIRENPAWRGAIPGLGLADRRSEITGPPERKMVVNALNTPVKTYMSDFEDSSSPTWLNVINGQVNLYDAVRHKVDFVHKDTGKAYRVDRTPGRHVPVIIVRPRGWHMVDKHIYVDGEPVSASMLDFGLYFFHNVRQLLANGHGPYFYLPKMEHHLEAKLWNDIFNVAQDCLAIPRGTIRATVLIETLPAAYQMEEIIYQLRDHSAGLNCGRWDYIFNTIKRLRNDASKVLPDRGLVTMKVPFMQAYCERLINVCHRRQVHAMGGMAAQIPIKNNDAANSAAMAKVKADKLREATMHYDGTWVAHPALAPIANGVFNEHMPTPNQIHIVPEENVRASDLSNTAIEGAQVTSNGIRENLYIALLYMEAWIRGNGCVPINNLMEDAATAEVSRLQLYSWVKHAVVLADTNEKVTPELALRFLDEEAAKLVAKFAGAENKVEVAAQYLRPEIRGDSLAEFLTTLVYDEIVTAGAPLDLSTLKE

SEQ ID NO: 1300 - protein, 259 aa, Candida akabanensis
  source 1..259: note = SBI01681_Succinate dehydrogenase iron-sulfur subunit
MFRQLVRPITRVASVRSLATATAPRIKKFQIYRWNPDTPEVEPKLQSYEVDLNTCGPMILDAILKIKNEQDATLTFRRSCREGICGSCAMNIEGKNTLACLCRINTDTSKETKIYPLPHMYIVRDLVPDLTHFYKQYKSIQPYLQRDTTPADGRENLQSMEDRAKLDGLYECILCACCSTSCPSYWWNQQQYLGPAVLMQAYRWLIDSRDEATKIRKEMLQNSMSLYRCHTIMNCSKTCPKGLNPGRAIAEIKKSLAFD

SEQ ID NO: 1301 - protein, 815 aa, Candida akabanensis
  source 1..815: note = SBI01681_Protein PDC2
MGYTIKQKIEICLKLEAEPHMTQLDLANWAKEKYGSTKPIAQTTISRILSSKNEILGSKEADFLLVRRRKQTNPLLRKILTEWITQAHWERIPITTPIIQLTAYAIWSRLPTALKDGNGVFNHKWCNSFVKKLNINLIGSPQAIRENMGYKLNKEWKLDEKLELKKYIRWLISEKNYAPCDIFTIDEFSLFYLLPLDQIFDISSIDKGLKQSSSSTENMLTIMLGCNIDGSEKLNPLVVSKHESIDVSSSSHSGLQSQLTALLSPLAIINKIGQVYQITYKSNNNKWITSSMFQDYLLTLDHKLENSTPDRNIIILLDNSSSHRMINLEFKHIKLVYLENTSKHKNPFNGPNSAKFDYLPMSFGIVEQFKILYRLQQYLEMINKQRNNSDSDTLVLPKLGSSMLNLASMKADGSTEVLSEQDYQIPFIKVIEWIHRSWDSISTQLIFLSWKHTYLINFNAPWPASNPQVVQRAQATLGPLLEGLATYDSQKSYKKLQEIMKYLNVVIPWEIDDLLGLVNERSKVSLSYASIEEIIGSCVAGHTVDEDSTKDENPPLNSTIVPEPWLATDSPALSLPESKMSVQAPRISESPLEAKTPLNALLQLAPLSSLANQPKLRQYDQLPGQSLKFGNNNYSEYTAPSPGPMSMNALLMATNVSKNEDIQASGFGSLPARQDFLPPVLMNNLGSAELKSRLGPEPALPERKRPHFMNPMPPSYFAAQAPAGLAAGQIGDTASRTPSAYPNNLISESLSRFASERNSAQSPTITETLPNEAELIGVLSRIIDASNGDGLKLSSYAVEELKSNLSKIQHKYGPN

SEQ ID NO: 1302 - protein, 627 aa, Candida akabanensis
  source 1..627: note = SBI01681_NAD-dependent malic enzyme
MLQNRIRTRSAFVRAARFHSSKLLSIHTHTIKTPVGVKAAIASLKPKTTRLSIEGPIECDLHGFQLLNSPIFNKGSAFTEEERKAFDLSGLLPSKVNTLDEQVERAYAQFQYLKTPLAKNDFCTSMRMQNKVLYYELVRRHIREMLPIIYTPTEGDAIAAYSHRFRKPEGCFLDITDPDSIELRLAVYGEDKDIDYVVVSDGEGILGIGDQGVGGIRIAIAKLGLMTLCGGIHPARVLPVVLDVGTNNEELQNDELYMGNKFDRVRGDQYWDFVDKFILALKKRFPSAVLHYEDFGVTTGRTMLHKYREALPSFNDDIQGTGAVVMASMTAALKFSSRNLLDSKVLIYGAGSAGLGIADQIVNHMVSHGSTREEACERIVIMDRRGVVLQSYKDSPEGQIRYADPDAKWEGINTKNLVEVVRKVQPTVLVGCSTQAGAFTEQVIKEMYKHNSQPIVFPLSNPTRLHEAFPVDIMKWTDNNALIATGSPFQPVDGYYISENNNCFTFPGIGLGAVLSRCTTITDTMISAAVDQLASMSPKMADPKNGLLPRLEEIDEVSAHVATAVILQSLKEGTAQVENEEKPGGGSVEVPRDYKLCLKWVQSQMWKPIYRPLVKVQHVPEIHTFQY

SEQ ID NO: 1303 - protein, 371 aa, Candida akabanensis
  source 1..371: note = SBI01681_Alcohol dehydrogenase
MLRVARPWASVRPFTLAKRFNSQYVIPSVQKAVVFETNGGPLIYKDIPVPKPKPNELLINVKYSGVCHTDLHAWKGDWPLPTKLPLVGGHEGSGVVVGMGESVVGWKLGDLAGIKWLNGSCQSCEYCDTGHESNCGHADLSGYTHDGSFQQYATADALQAAKIPEGTDLAGVAPILCAGITVYKALKTADLRAGQWVAISGAGGGLGSLAIQYAKALGYLVVAIDGGEDKGQMVKRLGADVFVDFTKEKNLPEKVKEVTGGGAHGVINVSVSPAAMSQSTEYVRPVGTVVLVGLPAGAEINMPVFDAVIKSVTIAGSYVGNRADTREAIDFFSRGLVESPIKLAGLSELPRIYEEMEQGAILGRYVVDTSY

SEQ ID NO: 1304 - protein, 679 aa, Candida akabanensis
  source 1..679: note = SBI01681_Acetyl-coenzyme A synthetase
MTSAPTHTVVHEANNVAQRATPDEFYQRQPNKGSIGSLEEYHKMYDQSINDPEAFFGPLAKELLHWDREFTQVKAGGLIHGDAQWFVNGELNASYNCVDRWAYAHPDKPAIIYEADDEKDSLTLTYGELLREVSKVASVLKSWGVTKGDTVAIYLPMNAFAVVAMLAVSRLGAIHSVIFAGFSSGSIRDRVNDARCKALITCDEGKRGGKTINIKKLCDEALLSCPSVKNVLVHRRTGNPDIALTEGRDFYWDVETAKQPAYLPPVSVNSEDPLFLLYTSGSTGTPKGVVHSTGGYLLGAALTTKYIFDVQSEDVLFTAGDVGWITGHTYAVYGPLLLGVPTIVFEGTPAYPDYGRLFQIVEKHKATHFYIAPTALRLLRKAGEQEIAKYDLSSLRTLGSVGEPISPDIWEWYNEKIGRGQCHISDTYWQTETGSHFIAPIAGVTPNKPGSASLPFFGINTVLIDPVSGHEIHGNDKEGVLAVKSTWPSMARTVYNNHEKYLDTYLKPYPGYYFTGDGAARDHDGYYWIRGRVDDVVNVSGHRLSTAEIEAALIEHHGVSEAAVVGINDDLTGQAVVAFVALKDEFADNINGKETSEEAFALRKDLILVVRKEIGPFAAPKSVIIVQDLPKTRSGKIMRRILRKISSYEADQLGDISTLSNPGSVASIIDSFGAQFGKK

SEQ ID NO: 1305 - protein, 348 aa, Candida akabanensis
  source 1..348: note = SBI01681_Alcohol dehydrogenase
MTIPTTQKALIFETNGGPLLYKDIPVPKPKPNELLINVKYSGVCHTDLHAWKGDWPLPTKLPLVGGHEGAGVVVAMGDNVKGWKVGDYAGVKWLNSSCNSCEFCQNTNESNCASADLSGYTHDGSFQQYATADAVHAAKIPQGTDLALVSPILCAGITVYKALKTAKLRAGQWVAISGAGGGLGSLAVQYAIAMGYRVVGIDGGSDKGDFVKSLGAEAFVDFTKSKDIVKDIQEITGGGPHGVINVSVSEKAISQSVEYVRSTGTVVLVGLPAGAKVVAPVFDAVVKSVNICGSYVGNRADSAEAIDFFTRGLIKCPIKIVGLSELPSVYELMEQGKILGRYVVDTSK

SEQ ID NO: 1306 - protein, 324 aa, Candida akabanensis
  source 1..324: note = SBI01681_Succinate--CoA ligase subunit alpha
MLSKQFARGFASTSVAKNYASTIPNLKVTKDTKVIYQGFTGRQATFHAEQAIAYGTQVVGGTNPKKAGTEHLGKPVFASVKDAMKETGADATGIFVPPSIAAAAIEEAIEAEIGLAVAITEGIPQHDMVRIAQILKTQSKTRLVGPNCPGLIAPDQCKIGIMPSHIHQKGRVGIISRSGTLTYEAVAQTTKVGLGQSLVIGMGGDPFPGTNFIDALTLYLNDPETEGIILIGEIGGTAEEEASEFLKQHNLTRPEGPKPVVSFIAGVSAPPGRRMGHAGAIVAGGKGDANSKIAALQSAGVVVEKSPARLGNSLLAEFKNKGLL

SEQ ID NO: 1307 - protein, 672 aa, Candida akabanensis
  source 1..672: note = SBI01681_Acetyl-coenzyme A synthetase
MPEQLALDHEKARDPPKGFFDRSSSKPNLPSLDEYQKLYKHSIEDPASFFGEQAKKLLVWDRPFDFARYPELPQDDFKNGDLPAWFLGGQLNASYNAVDRWAIETPNKAAIIYEGDEPNTGAVITYEELLKQVSKLAAALVKLGVRKGDTVAVYLPMIPEAIVTLLAITRIGAVHSVVFAGFSSTSLKDRIVDADSRIVITADESKRGGKTIETKKIVDEALKELPQVRNVLVFKRTGSSHVPFNKGRDLWWHEELAKYGNYFPPTPVNAEDPIFLLYTSGSTGKPKGIQHNTAGYLLGAALTTKYTFDVHQDDILFTAGDVGWITGHTYVVYGPLLNGATTVVFEGTPAYPDYSRYWQIVDKYKVNQFYVAPTALRLLKRAGTSFIEKFKLDSLRVLGSVGEPIAAEVWHWYNDNIGRGNAHIVDTYWQTESGSHLLTPLAGVTPTKPGSASLPFFGIEAHILDPVSGEELLEDGVEGVLAIKNAWPSIARGIFNDYSRFIDTYLGAYPGYYFTGDGAARDKDGFYWILGRVDDVVNVSGHRLSTAEIEAALIEHQLVAESAVVGYADELTGQAVAAYVSLKSNIKVNDKESIDAVKKELMLTVRREIGPFAAPKLILLVDDLPKTRSGKIMRRILRKVLAGEEDQLGDISTLSNPGVVLQIIEVVKQNRK

SEQ ID NO: 1308 - protein, 348 aa, Candida akabanensis
  source 1..348: note = SBI01681_Alcohol dehydrogenase
MSIPKTQKAVVFETNGGPLEYKTIPVPTPKENELLINIKYSGVCHTDLHAWKGDWPLATKLPLVGGHEGAGVVVGLGANVRGWKIGDLAGVKWLNGSCMQCEFCQHGDEPNCAEADLSGYTHDGSFQEYATADAVQAARLPQGTDLALAAPILCAGITVYKALKTANLQAGQWVCISGAGGGLGSLAVQYAKAMGYRVVGIDGGDEKGDFVKSLGAEAFVDFTKTKDIVADVKAATDGGPHGAINVSVSEKAISQSVDYVRATGTVVLVGLPAGAKVVAPVFDAVVKSISIAGSYVGNRADSAEAIDFFTRGLIKCPIKIVGLSDLPEVYKLMEEGKILGRYVVDTTK

SEQ ID NO: 1309 - protein, 562 aa, Candida akabanensis
  source 1..562: note = SBI01681_Pyruvate decarboxylase isozyme
MTEISLGRYLFERLNQLRVQTIFGLPGDFNLSLLDKIYEVDGMRWAGNANELNAAYAADGYSRVKGLACLITTFGVGELSALNGVGGSYAEHVGMLHVVGVPSISSQAKQLLLHHTLGNGDFTVFHRMSNNISQTTAFISDINSAPGEIDRCIREAYVHQRPVYVGLPANLVDLAVPASLLDTPIDLSLKQNDPDAQAEVIETVLDLVSQAKNPVILVDACASRHDCRGEVAQLVNATNFPVFVTPMGKSAVNESHPRFGGVYVGTLSEPDVKEAVESADLILSVGALLSDFNTGSFSYSYKTKNIVEFHSDYTKIRQATFPGVQMKEALNNLLAHIGQRVSHYTPVAVPQKKVVPSPGANAPISQEWLWSRVSSWFREGDIIITETGTSAFGIVQSYFPDNCVGISQVLWGSIGFTVGATLGAVMGAQEIDPKKRVILFVGDGSLQLTVQEISTMVKWETAPYLFVLNNDGYTIERLIHGENATYNDIQPWDNLALLPLFKSKNYETTRVSTVGEVESLFNNAAFNENSRIRMIEVMLPRMDAPLNLVKQAEFSSKTNAEN

SEQ ID NO: 1310 - protein, 411 aa, Candida akabanensis
  source 1..411: note = SBI01681_Succinate--CoA ligase subunit beta
MFSRVVRTSRVCQKRFLSLHEYRSAALLESYGVGVPKGFAATTPEGAFDAAKKLGTDKLVLKAQALTGGRGKGHFDNGYQGGVKLISSPEEAKEISEKWLHHKLITKQTGAAGKEVTAVYVVERADARTEAYLAILMDRSTQLPMIVASAQGGMDIEGVAAKDPNAIKTFSVDLDAGVTDKLATEIASVLGYTDEAIPEAAKTIQNLYKVFTEKDCTQVEINPLSETPDHKVLAMDAKLGFDDNADFRQKDVFSWRDTTQEDPEEVEASKYGLNFIKLDGNIANIVNGAGLAMATMDIIKLYGGEPANFLDCGGTATPQTIEKAFQLILSDKKVNGIFVNIFGGIVRCDYVAEGLIAATKNFNLDIPVVVRLQGTNMEKAKELIDNSGLKLYAFEDLDPAAEKIVQLAPKA

SEQ ID NO: 1311 - protein, 305 aa, Candida akabanensis
  source 1..305: note = SBI01681_Nitrilase
MSKYTVAALQIGASKEGTAKTLEKILSYEQELIDKKVKLVVLPEATLGGYPKGSQFGTYLGYRVPEGRKEFAEYFKQSVVVPGPEISQLEGLSSRTGATIAVGVVERGGSTLYCTIVYIDPAKGYVGKHRKLMPTATERLVWGQGDGLTLYVAESKELGKIGGGVCWENYMPLYRASFYAKGINVYVAPTVDDREIWASLIKTVAVEGRLFSISAVPYLPWEASTRELPGYTREQPINGGSLIVSPYGDVLAGPFVGAEGLLTAEVDMDIITEARYDLDPAGHYTRPDVFQLTVDERAKGTVFQN

SEQ ID NO: 1312 - protein, 428 aa, Candida akabanensis
  source 1..428: note = SBI01681_Isocitrate dehydrogenase
MLRTSIARQAKNSRCFSSSTLSLDKIKVKNPIVELDGDEMTRIIWARIKDKLINPYLDVDLKYYDLGIEARDKTDDQITIDAANAIKEFGVGVKCATITPDEARVAEFNLKKMWLSPNGTIRNILGGTVFRESIIIPRIPRLIPGWEKPIVIGRHAHGDQYKATDLVIEEPGKLELVFTPKNGGEPVTRTVFDYKDRGVGLAMYNTDESIIGFAHSSFKMALSQNLPLYLSTKNTILKKYDGRFKDIFQEIYDAEYASQFEQKGLWYEHRLIDDMVAQMIKSKGGFVMALKNYDGDVQSDIVAQGFGSLGLMTSALMTPDGKAYESEAAHGTVTRHFRQHQQGKETSTNSIASIFAWTRGIAQRGRLDGTNDVVDFANVLEKATVDTVQVDGIMTKDLALASGKTNRESYVTTTEFLDAVADRLKSSL

SEQ ID NO: 1313 - protein, 633 aa, Pichia fermentans
  source 1..633: note = SBI01683_Probable succinate dehydrogenase flavoprotein
MLSQLFKQHNPIIKSSLTLSRRLQSTTAADISKKYNIIDHEYDSIVIGGGGAGLRAAFGLSEAGFKTACISKVFVTRSHTVAAQGGINAALGNAHKDNWKHHMYDTVKGSDWLGDQDAIHYMTKNAPAAIYELEHYGVPFSRFPNGKIYQRAFGGQTKDYGKGGQAYRTCAVADRTGHSILHTLYGQATKHDTDFFIEYFVLDLLKLNGEVVGCIAYNQEDGTIHRFRAHNTVVATGGYGRVYASCTSAHTCTGDGGAMVSRAGFPLQDLEFVQFHPTGIYGSGCLITEGARGEGGYLVNSEGERFMERYAPSAKDLACRDVVARAITQEIAEGRGVGPKKDHMYLQLSHLPKDVLAERLPGISETIKIFSGIDITEKPAEIQPTVHYNMGLIPTNYHGQALTVDEAGKDQFIKGLYACGEAACASVHGANRLGANSLLDLVIFGRAVAHHIRDTTKPGEAHKPAPADLGFESLLNFEKLRTAKGTKRTAEIREHMQDVMQKHVSVFRTEPLLQEGVNQMKEVSKTFKDVKVEDDSLIWNSDLVETLELQNLLTLANQTAVSALTRKESRGAHVIVDPVTKEQVPRDDVNWLKHSLSYQKDITDDVEMKFRSVVMTTLDETECPPVPPAVRAY

SEQ ID NO: 1314 - protein, 361 aa, Pichia fermentans
  source 1..361: note = SBI01683_Alcohol dehydrogenase
MAIPKTQKGVTFYENNGELKYETIDVPTPKADEILINIKYSGVCHTDLHAWKGDWPLPVKFDPYCVGGHEGAGVVVAIGDNVKGWNLGDYAGIKWLNGSCMNCEECELSNESNCPEADLSGYTHNGSFQEYATGLAVQAAHIPKPEEGSEWYGKDDEYLAEVAPILCAGITVYKALKSADCKPGQWVAISGAAGGLGSLAVQYAKAMGLRVIGIDGGEGKEDLFKKCGGEIFVDFTKEKDVPAAINKATNGGAHGVISVSAAEAAISQSTQYVRTNGTIVLVGLPANAYCKSNVFEQVVRSYKIVGSYVGNRADTREALDFFERGLVRSPIKIVGLSELPRVFEEMAAGKILGRYVVDTTH

SEQ ID NO: 1315 - protein, 363 aa, Pichia fermentans
  source 1..363: note = SBI01683_Alcohol dehydrogenase
MSPKIPETQKAIVFYKNGGDLTYEDIKTPKPKPDEILINIKYSGVCHTDLHAWKGDWPLDVKLDPYLVGGHEGAGVVVAIGDNVKGWNLGDYAGIKWLNGSCMNCEECELSHESNCPEADLSGYTHDGSFQQYATGLAVQAAHIPKPEEGSKWYGKDDEYLAEIAPILCAGITVYKALKSSEAKPGQYVAISGAAGGLGSLAVQYAKAMGLVVVGIDGGEGKEELFKKVGGDVFIDFTKEKDVPKKILEVTKGGAHAVINVAVSEAAISQSTQYVRSNGTVVLVGLPANAYCKSNVFDQVVKSYKVVGSYVGNRADTREALDFFERGLVRSPIKIIGLSELPKVYEEMESGKILGRYVVDTSY

SEQ ID NO: 1316 - protein, 564 aa, Pichia fermentans; identical to SEQ ID NO: 1243
  source 1..564: note = SBI01683_Pyruvate decarboxylase isozyme

SEQ ID NO: 1317 - protein, 266 aa, Pichia fermentans; identical to SEQ ID NO: 1242
  source 1..266: note = SBI01683_Succinate dehydrogenase iron-sulfur subunit

SEQ ID NO: 1318 - protein, 674 aa, Pichia fermentans; identical to SEQ ID NO: 1229
  source 1..674: note = SBI01683_Acetyl-coenzyme A synthetase

SEQ ID NO: 1319 - protein, 337 aa, Pichia fermentans; identical to SEQ ID NO: 1228
  source 1..337: note = SBI01683_Malate dehydrogenase

SEQ ID NO: 1320 - protein, 564 aa, Pichia fermentans
  source 1..564: note = SBI01683_Pyruvate decarboxylase isozyme
MSEITLGRYVFERIKQVGVNTIFGLPGDFNLSLLDKIYEVEGLRWAASLNELNAAYAADGYSRIKGLGVIITTFGVGELSALNGIAGAYAEHVGVLHIVGVPSLASQAKQLLLHHTLGNGDFDVFHRMSANISETTAMITDLAAAPAEIDRCIRTAYIAQRPVYLGLPANLVDLTVPAKLLDTKIDLALKANDAEAEDEVVETILSLIADAKNPVILSDACASRHNVKNEVKQLIDATQFPAFVTPLGKGSIDEKHPRFGGVYVGTLSSPEVKQSVESADLVLSVGALLSDFNTGSFSYSYQTKNIVEFHSDYIKIKNASFPGVQMKFVLEKLIAKVGAKIANYSPVPVPAGLPKNAPVADSTPLAQEWLWNELGEFLEEGDIVVTETGTSAFGINQTRFPTDAYGISQVLWGSIGYSVGAMVGATFAAEELDKAKRVILFVGDGSLQLTVQEIACLIRWGLKPYIFVLNNNGYTIEKLIHGPTAQYNMIQNWKHLDILPTFGATEYEAIPVKTVGEWKKLTTDPAFKKNSTIRLIEVFLPEMDAPSSLVAQANLTAAINAKQD

SEQ ID NO: 1321 - protein, 416 aa, Pichia fermentans; identical to SEQ ID NO: 1225
  source 1..416: note = SBI01683_Isocitrate dehydrogenase

SEQ ID NO: 1322 - protein, 370 aa, Pichia fermentans
  source 1..370: note = SBI01683_Alcohol dehydrogenase
MMYRSLFRPLSATLIRIVFYKHNDGLKYQDIKTPEPKSNELLVKILYSGVCHTDLHVYKGDWTEINYKFDPYLVGGHEGAGIVVGMGSQVKGWKLGDLAGIKWLQSSCQACEYCETGHESNCDHAELSGATHNGSFQQYATTDAVQAARLTNPKDLDVWGEEKFAEYMAKVSPILCGGLTVYKALKSSNLKANQWCLVTGCGGGLGSLATQYANAMGFRVIGIDSGEEKEKFFKNLGGEVFIDFKKTNDIVSDIQQATKGGPHAVINLATSSDSISLSTKYCRTNGTIVLVGLPAGAVVKSDVFDHVVKSLNIVGSYVGNRADTREALEFFNRGLIKSEIKVVGLSELEHVFEDMENGRVVGRVVVDTSK

SEQ ID NO: 1323 - protein, 175 aa, Pichia fermentans; identical to SEQ ID NO: 1238
  source 1..175: note = SBI01683_Mitochondrial membrane protein SHH3

SEQ ID NO: 1324 - protein, 437 aa, Meyerozyma guilliermondii
  source 1..437: note = SBI02945_Isocitrate dehydrogenase
MLRSIGYTKPLSGGSRMTQATTISNGIRYLATGSKIKVKNPIVELDGDEMTRIIWQRIKDKLIHPYLDVDLKYYDLGIEARDKTDDQITIDAAHAIQKYGVGVKCATITPDEARVKEFGLKKMWLSPNGTIRNILGGTVFRESIVIPRVPRLVPGWKLPIVIGRHAHGDQYKATDLVVSGPGKLELKFTPKDGGESETRVVYDYQGPGVGLAMYNTDESIRGFAHSSFKMALSKKLPLYMLTKNTILKKYDGRFKDIFAEVYQEYQSEFEAQGLWYEHRLIDDMVAQMMKSQGGFVMALKNYDGDVQSDIVAQGFGSLGLMTSVLMTPDGKAFESEAAHGTVTRHFRQHQQGKETSTNSIASIFAWTRGLAQRGRLDNTPEVVEFAERVEKATVDTVDKQGIMTKDLAIACGNLDRSAYVTTTEFLDAVADSVANSK

SEQ ID NO: 1325 - protein, 551 aa, Meyerozyma guilliermondii
  source 1..551: note = SBI02945_Malate synthase
MSNPFPKTEDKLKGVQILASIPDRSKHIFNPEAVAFVATLHRAFNGERKRLLANRKQQQQLRDQGVLPDFLPETKHIREDPTWTGPPLAPGLRDRRVEITGPTDRKMVINALNSGVATYMADFEDSLTPAWDNLVDGQTNLYDAVRRDLKFESGGKKYELKLENGKHIPTLIVRPRGWHLEEKHFLVDGEPVSGGIFDFALYFFNSAKEAIAQGFGPYFYLPKMEHHLEAKLWNDIFNYSQDYIGINRGTIRGSVLIETLPAAFQMDEIIYQLRQHIGGLNCGRWDYIFSYIKSLRNHPEFILPDRSQVTMSAPFMSSYVKLLVNTCHKRQVHALGGMAAQIPIKNDEQRNKAALENVAKDKLREVMAGCDSCWVAHPALVPVVLKVFNEHMKGPNQINVPPRTPYKPVTARDLLSPYVPGAKITEQGIRANCIIGLSYIEAWLRNVGCVPINYLMEDAATAEVSRTQIWQWVTHGAKTDKGELITKEYVAKLLQEEYSKLEKAAPSGNKFKRALEYFKPEASAEKYSDFVTTLIYDDVTTIGRPTSAEKL

SEQ ID NO: 1326 - protein, 135 aa, Meyerozyma guilliermondii
  source 1..135: note = SBI02945_Succinate dehydrogenase assembly factor 2
MSVRRIAIRCLNYGKPQNPAYNASLSMRIEPIKRTGETRETKKARLVYQSRKRGILESDLLLSRFAKKHLDSLSDSQLDEYDQLLDEPDWDIYYWATKNYDVTPLPDRWKDSEILKMLQKDAQNEDREIMRMPEL

SEQ ID NO: 1327 - protein, 257 aa, Meyerozyma guilliermondii
  source 1..257: note = SBI02945_Succinate dehydrogenase iron-sulfur subunit
MIKSVLRQRIPFRGLATLAQQPALKKFQIYRWNPDTPEVEPQMKTYEVDLNQCGPMVLDAILKIKNEQDSTLTFRRSCREGICGSCAMNIGGINTLACLCKIDKDTSKDTKIYPLPHMFVVRDLVPDLTHFYKQYKSIQPYLQRETLPSDGRENLQSIEDRAKLDGLYECILCACCSTSCPSYWWNQQEYLGPAVLMQAYRWLIDSRDEATKARKQMLQNSMSLYRCHTIMNCARTCPKGLNPGRAIAEIKKQLAFD

SEQ ID NO: 1328 - protein, 336 aa, Meyerozyma guilliermondii
  source 1..336: note = SBI02945_Malate dehydrogenase
MVKVTVCGAAGGIGQPLSLLLKLNPKIDELALFDVVNVPGVGADLSHICSNSTTSSHLPSAKEDKTALADSLKNSDLVIIPAGVPRKPGMTRDDLFNINASIVQGLAQGIAETCPDAFVLIISNPVNSTVPIVAETLKKNNVFNPKKLFGVTTLDIVRANTFISQLFPKESKPTDFNINVIGGHSGETIVPLYSLGNSKQYLDKLSEEQQKELIHRVQFGGDEVVQAKNGAGSATLSMAYAGYKLAESILKALDTPNVVECTFLNLDSSIKGASEAKKLVGNLDFFSLPVKLGKSGIEEVQYEILDKISDNEKKLLEVAVDQLSKNIEKGVSFVKK

SEQ ID NO: 1329 - protein, 332 aa, Meyerozyma guilliermondii
  source 1..332: note = SBI02945_Malate dehydrogenase
MFTKIATRSFSSTSASAYKVAVLGANGGIGQPLSLLLKLNHKVTDLSLYDLKGAPGVAADVSHIPTHSTVRGYNPENLKEALTGADVIVIPAGVPRKPGMTRDDLFNTNASIVRDLAKAAADHAPNAAVCIISNPVNSTVPIVAEVFKSKGTYNPKKLFGVTTLDVLRASRFVAEVANTNPVHEKVTVVGGHSGVTIVPLLSQTNHKSLDAETRDALIHRIQFGGDEVVQAKNGAGSATLSMAQAGARFTGAVLDGLAGENDVVEPSFVDSPLFKDEGVDFFASKVTLGTEGVKKVHSLGELSGHEEELIKTAKETLIKNIQKGVEFVKQNP

SEQ ID NO: 1330 - protein, 404 aa, Meyerozyma guilliermondii
  source 1..404: note = SBI02945_Succinate--CoA ligase subunit alpha
MHPSATACNHGFAMWSRRLSHIERESDICNQNAIRTHLSAPWFCNQGAARPRNFVPLPGPPCPGFARTRPVRKMPEFQNTLVIMKSIRSLSTSAPLRNYASTIKNLKVNLDTKVIYQGFTGRQGTFHAEQAIAYGTKIVGGTNPKKAGSTHLDRPVFANVSDAIKETGANATAIFVPPSIAAAAIEEAIEAEIELAVAITEGIPQHDMVRIAQMLKTQSKTRLVGPNCPGLIAPDQCKIGIMPSHIHQRGKVGVISRSGTLTYEAVAQTTGVGLGQSLVIGMGGDPFPGTNFIDALTLFLEDKETEGIILIGEIGGTAEEEASEFLKQHNLTRPDGPKPVVSFIAGVSAPPGRRMGHAGAIISGGKGDAKSKIAALESAGVVVERSPARLGNSLLEEFKNKGLL

SEQ ID NO: 1331 - protein, 408 aa, Meyerozyma guilliermondii
  source 1..408: note = SBI02945_Isocitrate dehydrogenase
MSSKITVKNPIVEMDGDEMTRIIWKFIKDKLITPYLDVDLKYYDLGIEYRDQTDDKVTTDAADAILKYGVGVKCATITPDEARVKEFNLKKMWLSPNGTLRNILGGTVFREPIVIDNIPRVVPTWEQPIIIGRHAYGDQYKATDVVIPQAGELSLVFKPADGSETKTYPVFNYKAPGVALSMYNTDESITDFAESSFQLALQRKMNLFSSTKNTILKRYDGRFKDIFEGLYESKYKKLFDEAGIWYEHRLIDDMVAQMLKSKGGYIIAMKNYDGDVQSDIVAQGFGSLGLMTSVLMTPDGKAFEAEAAHGTVTRHYRQHQQGKETSTNSIASIYAWTRGIIQRGILDETPEVVKFGEALEKAVIDTVSKDGIMTKDLALTQGKTDRSSYVTTEEFIDAVKVRLDKNLA

SEQ ID NO: 1332 - protein, 514 aa, Meyerozyma guilliermondii
  source 1..514: note = SBI02945_Aldehyde dehydrogenase 5
MFKSTAKQAFKSAPTLARMYSDLPLSVKVTFPTGKSYDQPTGLFINNEFVLPKRKKTFEVISPSTEEEICHVYEAREEDIDAAVEAAEAAFNTEWSTGPPLERTKYMTRLADLIEEHADTLAHIDTFDNGKSLANSRGDVALAANYIRSCAGWADKIQGTAPDTGSGHLNIVKREPIGVCGQIIPWNFPLLMLSWKLGPALATGNTIVLKTAETTPLSGLYVAKLIKEAGFPKGVVNIVSGFGKIAGDAIATHKKIKKVAFTGSTATGRHIMRAAANSNLKKVTLELGGKSPNIVFNDADIDVTVQNLVTGIFYNTGEVCCAGSRVYVQDGIYDELLAAFKKAAEDVKIGDPFAEDTFMGAQNSSTQLDKILKYIEIGKSEGAKVVAGGARHGDKGFFVKPTIFGDVKEDMQIVKDEIFGPVVTISKFSTVDEVVKLANDSEYGLAAGIHSTNMNTIMSVANRIKAGTVWVNTYNDFDHMVPFGGYGQSGIGRELGEAALDNYTQVKSIRVGLH

SEQ ID NO: 1333 - protein, 563 aa, Meyerozyma guilliermondii
  source 1..563: note = SBI02945_Pyruvate decarboxylase isozyme
MTEITLGRYLFERLSQLNVNSIFGVPGDFNLSLLDKIYEVDGMRWAGNANELNAAYAADGYSRIKGLSCLVTTFGVGELSALNGVAGAYAEHVGLLHVVGIPSITSQAKQLLLHHTLGNGDFTVFHRMSNNISQTTAFISDINHAPKEIDRCIREAYVYQRPVYVGLPANLVDLKVPASLLDTPLDTSLKPNDPDAQEEVVDLVLKLISEAKDPIILVDACASRHNCRGEVEKLVDVTQFPVFTTPMGKSTINESHKRFGGVYVGTLSQPEVKEAVESADLVLSVGALLSDFNTGSFSYSYKTKNIVEFHSDYTKIRQATYPGVQMKEALRKLLESVAQALKGYQPCPVPNVKLLNTPGPASTQLSQEWLWTKVSSWFREGDIIITETGTSAFGIVQSRFPNQTVGISQVLWGSIGFTVGATLGAVMAAQEIDPAKRVILFVGDGSLQLTVQEISTMVKWETTPYLFVLNNDGYTIERLIHGVNATYNDIQPWNNLALLPLFNARNYETYQVSTTGEIDKLFSDPDFATNSKIRMIEVMLPRMDAPANLVAQATLSAQTNAEN

SEQ ID NO: 1334 - protein, 370 aa, Meyerozyma guilliermondii
  source 1..370: note = SBI02945_Alcohol dehydrogenase
MLRAAPVFRANAGVRIARTLASYTIPEKQKAVIFETNGGELKYTDIPVPKPKPNELLINVKYSGVCHTDLHAWKGDWPLDTKLPLVGGHEGAGVVVGMGENVVGWKVGDLAGIKWLNGSCQACEYCDGGHESNCAQADLSGYTHDGSFQEYATADYIQAARIPEGTDLAQVAPILCAGITVYKALKTANLTQGQWVAISGAGGGLGTLAVQYAKAMGYLVVGIDGGADKAKSAKSLGADAFVDFTKDKDVVAKIQEITNGGPHGVINVSVSPQAMQQSVDYVRPTGTVVLVGLPADAAVNASVFDSVVKTISIRGSYVGNRADTREAIDFFTRGLVHSPIKLAGLSELPRIYEEMEKGAIVGRYVVDTSK

SEQ ID NO: 1335 - protein, 348 aa, Meyerozyma guilliermondii
  source 1..348: note = SBI02945_Alcohol dehydrogenase
MAIPTKQKAVIFETNGGELQYKDIDVPKPKPNEILINVKYSGVCHTDLHAWKGDWPLATKLPLVGGHEGAGEVVAIGENVTGWELGDLAGIKWLNGSCLSCEFCITSKESNCPHADLSGYTHDGSFQQYATADAVQAARIPKGTDLAQVAPILCAGITVYKALKTADLTAGQWVAISGAAGGLGSLAVQYAKAMGYRVVGIDGGADKGEFAKSMGAEAFVDFLTSKDLVKDVIKATNGGPHGVINVSVSERAMQQSVEYVRPAGTVVLVGLPAGAKVSASVFDSVVKTISIKGSYVGNRADSAEAIEFFSRGLIKCPIKVVGLSELPKVYELMAEGKILGRYVVDTYK

SEQ ID NO: 1336 - protein, 641 aa, Meyerozyma guilliermondii
  source 1..641: note = SBI02945_Probable succinate dehydrogenase flavoprotein
MLSVAKIGRAKARWAISRSFASSAIRSQTIGDIKGKDVNASKYMSQKYHVIDHEYDCVVVGAGGAGLRAAFGLAEAGFKTACISKLFPTRSHTVAAQGGINAALGNMHKDDWHWHMYDTVKGSDWLGDQDAIHYMTKEAPQSIYELENYGVPFSRNEEGRIYQRAFGGQSKEYGKGGQAYRTCAVADRTGHALLHSLYGQSLRHDTHFFIEFFAMDLLMQDGACVGVIAYNEEDGTLHRFRAHRTVIATGGYGRAYFSCTSAHTCTGDGYAMVSRAGLPLEDLEFVQFHPSGIYGSGCLITEGARGEGGFLVNSEGERFMERYAPSAKDLASRDVVSRAITMEINEGRGVGPHKDHMYLQLSHIPAAVLKERLPGISETAHIFAGVDVTKEPIPILPTVHYNMGGIPTKWNGEVLKKNEKGEDEVVPGLLACGEAACASVHGANRLGANSLLDLVVFGRAVSHTIRDNLTPNTPHKPMPQDLGVESIENLDRLRNANGTHSTADLRLEMQKTMQKGCAVFRTQETLDEGVEHILKVDKKFHDVKTTDRSMIWNSDLVETLELQNLLTCATQTAVSAAARKESRGAHARDDYPERDDENWRKHTLSYQTGFGEEVKLDYRDVIRTTLDENDCKPVPPAKRVY

SEQ ID NO: 1337 - protein, 670 aa, Meyerozyma guilliermondii
  source 1..670: note = SBI02945_Acetyl-coenzyme A synthetase
MPESTDHLDHEKMLDPPKGFFERSTSKPNLASLDEYKKLYKQSIEDPATFFGNAAKLFLDWDRPFDYTRFPVDPKDDFKNGDIPSWFINGQLNASYNAVDRWAMKNPEKPAIIYEADEVNEGRTITYGELLKDVSKLAATLTNLGVKKGDSVAVYLPMIPEAIVTLLAIVRIGALHSVVFAGFSSTSLRDRIIDADSRIVITADESKRGGKTIETKKIVDDALKECPHVRNVLVFKRTGNSHVPFLAGRDLWWHDELQKYGPYFPPVPVNSEDPLFLLYTSGSTGKPKGVQHNTAGYLLGALMTAKYTFDLHEEDIIFTAGDVGWITGHTYVVYGPLLCGATTVVFEGTPAYPDYSRYWDVVDKYKVNQFYVAPTALRLLKRAGTKYVEKHDLSSLRVLGSVGEPIAAEVWHWYNDNIGRGKAHIVDTYWQTESGSHLLTPLAGVTPTKPGSASLPFFGIDARILDPVSGKDLVDNNVEGVLCVKSAWPSITRGIYHDYARYIETYLKPYPNHYFLGDGAARDKDGFFWILGRVDDVVNVSGHRLSTAEIEAALIEHELVGESAVVGYADELTGQAVAAYVSLKSNVEVDDLEAIKKELILTVRKEIGPFAAPKLILLVDDLPKTRSGKIMRRILRKVLAGEEDQLGDISTLSNPQVVSQVIEVVKASRK

SEQ ID NO: 1338 - protein, 668 aa, Meyerozyma guilliermondii
  source 1..668: note = SBI02945_Acetyl-coenzyme A synthetase
MTQQHSVVHEANTSLLRPIPEEFFAKQPRKGHVESLEQYHELYKNSIEDPQGFFGPLAKDLLSWDREFTHVKSGSLQHGDAAWFLNGQLNASYNCVDRHALATPDKIAIMYEADEEKDSYTLTYAELLREVSKVAGVLTSWGIKKGDTVAIYLPMNPQAIIAMLAVARIGAIHSVIFAGFSLGSIKDRVNDAACKALLTCDEGRRGGRPVNIKKLCDDALEQCPTVEKVLVFKRTGADVAMKKGRDFYWDEETANFPGYTPPVPVNSEDPLFLLYTSGSTGTPKGVLHTTGGYLLGAALTTKYVFDIHPEDILFTAGDVGWITGHTYALYGPLALGVSTIVFEGTPAYPDYGRLWQIVDKYKATHFYVAPTALRLLRKAGEEELAKYDLSTLRTLGSVGEPISPDIWEWYHEKVGRGKCHITDTYWQTESGSHFIAPFAGITRNKPGSASLPFFGVQACLIDPVSGHEISGNDVEGVLAIKDTWPSMARSVWKNHTKYMDTYLKPYPGYYFTGDGAARDHDGYYWIRGRVDDVVNVSGHRLSTAEIEAALIEHHGVSEAAVVGINDDLTGQAVVAYVALKDEAAGANGDELRKALVLQVRKEIGPFAAPKSVIIVADLPKTRSGKIMRRILRKISSNEADQLGDITTLANPQSVEGIIKEFSLQFGKK

SEQ ID NO: 1339 - protein, 317 aa, Meyerozyma guilliermondii
  source 1..317: note = SBI02945_Nitrilase
MGAKVKVAVVQAEPVWFNLQETVKRVNELIELAYNKGAELIAFPEVFVPGYPTWIWTNAADLDRNLMYTKNSLTYDSPEFISIIETVKKYPIHVVLGFSEKDQGSLYISQCIIDNTGEIVLKRRKFKPTHVERVIWGDTADSNMKSVVTLNFKEAGPVEVGCLSCWEHMQPLLYYNSAAQHEKIHIGSWPALNDKDLGVYCFTKAGFHGLARAYANQVQSFYLFTSILGQRIQEALPDVKLSPYFEKGAGCGAVFAPDGSQITEDHPDDFDGVIISELDMDKILLQKNLVDIVGHYSRPDMVSLSHNRPNTEFVNRK

SEQ ID NO: 1340 - protein, 411 aa, Meyerozyma guilliermondii
  source 1..411: note = SBI02945_Succinate--CoA ligase subunit beta
MLTRAIRASRVSQKRFLSLHEYRSAALLKSYGVGVPSGDAALTPQQAYDVAKSIGSNELVIKAQALTGGRGKGHFDNGFQGGVKMISTPEEAKELSEKMLGHKLITKQTGEAGKEVTAVYIVERKDAKTEAYLAILMDRATQLPMIVASSQGGMDIEGVAAKDPDAIKTFPIQLDEGVTDSKATEIASVLGFSQEAVPEAALTIQKLYKVFMERDCTQVEINPLSEITDGSVMAMDAKLGFDDNASFRQKEVFSWRDPTQEDPEEVEAAEYGLNFIKLDGNIANIVNGAGLAMATMDIIKLNGGEPANFLDCGGTATPETIEKAFELILSDKKVNGIFVNIFGGIVRCDYVAKGLIAATKNFQLDIPVVVRLQGTNMKEAKELINNSGLKLYPFEDLDPAAEKIVSLAPAS

SEQ ID NO: 1341 - protein, 625 aa, Meyerozyma guilliermondii
  source 1..625: note = SBI02945_NAD-dependent malic enzyme
MLRNFRFLSSLAKKAAANAEHQSVHTHTIKTPVGIRAAIESLKPKTTRLSIEGAIECDLEGFQILNSPIFNKGSAFTRQEREAFKLTGLLPSQVNTLEEQVGRAYAQFSYLKTPLAKNDFLVSMRMQNKVLYYELVRKHIREMLPIIYTPTEGDAIAAYSHRFRKPEGCFLDINDPDSIPQRLASYGEDKDIDYIVVSDGEGILGIGDQGVGGVRIAIAKLGLMTLCGGIHPGRTLPVVLDTGTNNEKLLSDDLYMGNKFPRVRGEQYWDFIDKFITAVKERFPSAVLHYEDFGVSTGRTMLHKYRQAIPSFNDDIQGTGAVVMASMTAALKFTNRNLLDSKVLIYGAGSAGLGIADQIVNHMRSHGATTEEACKSIHCMDRRGLILKSYDDSTEGQKRYADDDADWEGIDTKNLVEVIKKIKPTALVGCSTQPGAFTEEVVRAMYEHNKQPIIFPLSNPTRLHEAIPEDLMKWTDNNALIATGSPFQPVNGYVISENNNCFTFPGIGLGAVLSRCSTISDSMISAAVDQLASLSPKMENPKNGLLPRLEEIDEVSAKVATAFILQSLEEGTSRVESEKRPDGGMVHVPRDFNECLKWVQSQMWRPIYRPLVKVEHVPEIHTFQH

SEQ ID NO: 1342 - protein, 551 aa, Candida dosseyi
  source 1..551: note = SBI03199_Malate synthase
MSSPFPTVALKLQGVQILGPVPSEAKHIFNPEALALVATLHRNFQGQRKKLLANRKEQQKLRDSGVLPDFLPETEYIREDPTWTGPPLAPGLQDRRVEITGPTDRKMVINALNSGVATYMADFEDSLTPAWANLVDGQVNLHDGVRRNLSFSSNGKQYKLNLDKGRHIPTLIVRPRGWHLDEKHVLVDGEPVSGGIFDFAIYFYNNAKETLARGFGPYFYLPKMEHHLEAKLWNDIFNQAQDYIGIPRGTIRGSVLIETLPAAFQMDEIIYQLRQHIGGLNCGRWDYIFSYIKSLRNHSEFILPDRSQVTMTAPFMASYVKLLVHTCHKRQVHALGGMAAQIPIKEDEKRNKAALENVAKDKLREVMAGCDSCWVAHPALVPVVLKVFNEHMKGPNQINVPPRKPYTPVTARDLLSPFVPDAKITEQGIRTNCIIGLSYIEAWLRNVGCVPINYLMEDAATAEVSRTQLWQWVTHGAHTDAGKLIDKAYVSKLLDEEYGKLSKSGKPGNKFKAAYNYFKPEALGEKYSDFVTTLIYDDVTTVGRPVPAEKL

SEQ ID NO: 1343 - protein, 141 aa, Candida dosseyi; identical to SEQ ID NO: 1297
  source 1..141: note = SBI03199_Succinate dehydrogenase assembly factor 2

SEQ ID NO: 1344 - protein, 815 aa, Candida dosseyi; identical to SEQ ID NO: 1301
  source 1..815: note = SBI03199_Protein PDC2

SEQ ID NO: 1345 - protein, 627 aa, Candida dosseyi
  source 1..627: note = SBI03199_NAD-dependent malic enzyme
MLQNRIRTRSAFVRAARFHSSKLLSIHTHTIKTPVGVKAAIASLKPKTTRLSIEGPIECDLHGFQLLNSPIFNKGSAFTEEERKAFDLSGLLPSKVNTLDEQVERAYAQFQYLKTPLAKNDFCTSMRMQNKVLYYELVRRHIREMLPIIYTPTEGDAIAAYSHRFRKPEGCFLDITDPDSIELRLAVYGEDKDIDYVVVSDGEGILGIGDQGVGGIRIAIAKLGLMTLCGGIHPARVLPVVLDVGTNNEELQNDELYMGNKFDRVRGDQYWDFVDKFILALKKRFPSTVLHYEDFGVTTGRTMLHKYREALPSFNDDIQGTGAVVMASMTAALKFSSRNLLDSKVLIYGAGSAGLGIADQIVNHMVSHGSTREEACERIVIMDRRGVVLQSYKDSPEGQIRYADPDAKWEGINTKNLVEVVRKVQPTVLVGCSTQAGAFTEQVIKEMYKHNSQPIVFPLSNPTRLHEAFPVDIMKWTDNNALIATGSPFQPVDGYYISENNNCFTFPGIGLGAVLSRCTTITDTMISAAVDQLASMSPKMADPKNGLLPRLEEIDEVSAHVATAVILQSLKEGTAQVENEEKPGGGSVEVPRDYKLCLKWVQSQMWKPIYRPLVKVQHVPEIHTFQY

SEQ ID NO: 1346 - protein, 428 aa, Candida dosseyi; identical to SEQ ID NO: 1312
  source 1..428: note = SBI03199_Isocitrate dehydrogenase

SEQ ID NO: 1347 - protein, 305 aa, Candida dosseyi; identical to SEQ ID NO: 1311
  source 1..305: note = SBI03199_Nitrilase

SEQ ID NO: 1348 - protein, 411 aa, Candida dosseyi
  source 1..411: note = SBI03199_Succinate--CoA ligase subunit beta
MFSRVVRTSRVCQKRFLSLHEYRSAALLESYGVGVPKGFAATTPEGAFDAAKKLGTDKLVLKAQALTGGRGKGHFDNGYQGGVKLISSPEEAKEISKKWLHHKLITKQTGAAGKEVTAVYVVERADARTEAYLAILMDRSTQLPMIVASAQGGMDIEGVAAKDPNAIKTFSVDLDAGVTDKLATEIASVLGYTDEAIPEAAKTIQNLYKVFTEKDCTQVEINPLSETPDHKVLAMDAKLGFDDNADFRQKDVFSWRDTTQEDPEEVEASKYGLNFIKLDGNIANIVNGAGLAMATMDIIKLYGGEPANFLDCGGTATPQTIEKAFQLILSDKKVNGIFVNIFGGIVRCDYVAEGLIAATKNFNLDIPVVVRLQGTNMEKAKELIDNSGLKLYAFEDLDPAAEKIVQLAPKA

SEQ ID NO: 1349 - protein, 562 aa, Candida dosseyi; identical to SEQ ID NO: 1309
  source 1..562: note = SBI03199_Pyruvate decarboxylase isozyme

SEQ ID NO: 1350 - protein, 371 aa, Candida dosseyi; identical to SEQ ID NO: 1303
  source 1..371: note = SBI03199_Alcohol dehydrogenase

SEQ ID NO: 1351 - protein, 259 aa, Candida dosseyi; identical to SEQ ID NO: 1300
  source 1..259: note = SBI03199_Succinate dehydrogenase iron-sulfur subunit

SEQ ID NO: 1352 - protein, 409 aa, Candida dosseyi; identical to SEQ ID NO: 1296
  source 1..409: note = SBI03199_Isocitrate dehydrogenase

SEQ ID NO: 1353 - protein, 324 aa, Candida dosseyi; identical to SEQ ID NO: 1306
  source 1..324: note = SBI03199_Succinate--CoA ligase subunit alpha

SEQ ID NO: 1354 - protein, 629 aa, Candida dosseyi; identical to SEQ ID NO: 1295
  source 1..629: note = SBI03199_Probable succinate dehydrogenase flavoprotein

SEQ ID NO: 1355 - protein, 331 aa, Candida dosseyi; identical to SEQ ID NO: 1293
  source 1..331: note = SBI03199_Malate dehydrogenase

SEQ ID NO: 1356 - protein, 335 aa, Candida dosseyi; identical to SEQ ID NO: 1292
  source 1..335: note = SBI03199_Malate dehydrogenase

SEQ ID NO: 1357 - protein, 558 aa, Candida dosseyi
  source 1..558: note = SBI03199_Malate synthase 1
MVYSSLDNVEVRAPISAKPEYDSGTSQADILTQSALSFVVLLHRAFNATRKELLDNRQKVQAQLDAGKPLDFLQDADLVKIRENPAWRGAIPGLGLADRRSEITGPPERKMVVNALNTPVKTYMSDFEDSSSPTWLNVINGQVNLYDAVRHKVDFVHKDTGKAYRVDRTPGRHVPVIIVRPRGWHMVDKHIYVDGEPVSASMLDFGLYFFHNVRQLLANGHGPYFYLPKMEHHLEAKLWNDIFNVAQDCLAIPRGTIRATVLIETLPAAYQMEEIIYQLRDHSAGLNCGRWDYIFNTIKRLRNDASKVLPDRGLVTMKVPFMQAYCERLINVCHRRQVHAMGGMAAQIPIKNNDAANSAAMAKVKADKLREATMHYDGTWVAHPALAPIANGVFNEHMPTPNQIHIVPEENVRASDLSNTAIEGAQVTSNGIRENLYIALLYMEAWIRGNGCVPINNLMEDAATAEVSRLQLYSWVKHAVVLADTNEKVTPELALRFLDEEAAKLVAKFAGAENKVDVAAQYLRPEIRGDSLAEFLTTLVYDEIVTAGAPLDLSTLKE

SEQ ID NO: 1358 - protein, 672 aa, Candida dosseyi; identical to SEQ ID NO: 1307
  source 1..672: note = SBI03199_Acetyl-coenzyme A synthetase

SEQ ID NO: 1359 - protein, 525 aa, Galactomyces geotrichum
  source 1..525: note = SBI04932_Aldehyde dehydrogenase
MSIARTFNLASKTLKVSPTKSLAFSAMRLYSTKLPLSTEVTLPNGLKYEQPTGIFINNEFKPSISGKTFKVENPSTEQVVAEIYEGDVEDINVAVDAAEKAFKTWSVLPPSERGRLLCKLADKIEENLELLASIESTDNGKAIALARGDVTLVARVLRYYGGFADKITGTVIETNDGHFTYTRREPIGVCGQIIPWNFPLLMWSWKVGPALATGNTVVLKTAESTPLSALVASKLAAEVGFPPGVLNIVSGYGKAGAALSSHMRVKKVAFTGSTNTGRSILRAAAESNLKKTTLELGGKSPNIVFADADIGKAIEMTNLGIFYNSGEVCCAGSRIYVQDSIYDKFLQELKVRSEANKVGDPFDSETFQGPQTSKTQLDKILHYIDIGKKDGATLVTGGKRLDRPGYFIAPTVFADVKEDMQVVKEEIFGPVVTVSKFSSVDEVIELANNSEYGLAAGIHTQDVNKAIDVSNRLNAGTIWVNTYNSFHEAVPFGGYGQSGIGREMGEQALDNYTQVKAVRLAIEKK

SEQ ID NO: 1360 - protein, 1146 aa, Galactomyces geotrichum
  source 1..1146: note = SBI04932_chitin synthase
MNVQPSATGNDPNLQDFNSNVPPIQLSDMSHHVNTPVVRIDEEGETESVYDDRVERSGSSHSARPQNDYRYSEESDTSRSTPSPYTSQNYGKHETHVNTVDADTLLNTKRNSTASAKNKKKDEKAAGPPPSLWRTYCFIVTFWAPSFLMKYFGMPTRDRQIAWREKIGLITIILYVAAFVAYLTFGFTTTVCNNNVVRLRNNEVNSGMLIIHGHVYDLTQSKHPAAHGVPPNSNILYPPVNAGGRDASFLFQNVNGHCLNVLTPRENSSIPSSGNDLAYYMPCKTFAQDGSTQANFTSEYYDGWACHTSTTARKALWSLKSAGEVYFTWDDVRNTSRNLIVFNGNVIDLDLINWIDTDSINVPQIFYDVRDDANIKGVDVSQIYAQGEARKMVRCLSDIAMVGYVDADQIGCLASKVVLYVSLVFIIGIVAIKFLFAIYFKWFVTGKQGANYMDLKTMAKHEQEVEDWSNNMYAQGPVKNAPKAFPQSTQGRVSMFRPRSALPSGNVTMGSQLPSSSTSKLLPSGTYLQENLSSRASVFNTLDDPYRSSKSITGDTSYVGATDAYSGDQDLEPGAPGYLVPQPPVDYQPFGFPLAHTICLVTAYSESVEGLRTTLDSVATTDYPNSHKLILVICDGLIKGSGNDMTTPEIALSMMKDFVEPPDQVQAYSYVSVVSGMKRHNMAKVYAGFYDYDNDTMDPSKQQRVPMITIVKCGTPAEQGAAKPGNRGKRDGQVILMSFLQRVMFDERMTELEYEMFNGIWKVAGVAPDFYEIVLMVDADTKVFPDSITHMVGQMVKDPEIMGLCGETKISNKSDSWVTMIQVFEYFISHHQSKAFESMFGGVTCLPGCFCMYRIKAPKGEEGYWVPILANPDIVEHYSENVVDTLHKKNLLLLGEDRYLSTLMLRTFPKRKQIFIPKAACKTIVPDEFKVLLSQRRRWINSTVHNLMELVLVRDLCGVFCISMQFVVFIELIGTLVLPAAIAFTIYVIIIAIVKKPTPVLSLILLALILGLPGVLIVVTASRPSYILWMFIYLLSLPVWNFVLPCYAYWKFDDFSWGDTRTIAGGDKGGHDDDEGEFDSSQIVMKRWRDFERDNHRFQQQQMQQPWESSSPPSAGFRSQTFNSGTPVSEYGGLNDYNNPNQQHMV

SEQ ID NO: 1361 - protein, 681 aa, Galactomyces geotrichum
  source 1..681: note = SBI04932_chitin synthase
MTNAAKLKGQDISALISANSQSQQTGNCLIELAKIGVIESESVGCITAHIVLYLSMIFIVLIVLVKFVFALYFEWRMSWRLGDGFQNLPFMTTASTLKRACSSVSTTVRKVHCPASKDCNNNKRGLVIDDPIMQKYEPKWTFGLENDPFYTLLLVTCYSESQDGIRNTLDSLATCRYSNDHKLIIVICDGLITGSGNQKSTPDIVLSMMERFIVPEDETLLQSYVAVATGGRRYNTAKAYAGFYKYDDSTMPRAQQVDIPILCIVKHGDTWERENEGIKSGNRGKRDSQVLLMTFLQKLMFNERMCDLENYMYLLIWQLVGRDVMEYETILMVDADTKIQPDSLGHLIKCMMKDSDIMGLCGETQIINKWESWVTMIQVFEYFISHHLTKSFESVFGGVTCLPGCFSLYRIKSRKGPRGYWVPVLVNPDIVERYGENEVTSLHRKNLLLLGEDRYLSTLMLKTFPTRKQIFIPQAKCETVVPSEFRVLLDQRRRWINSTIHNLLELVVVRDLCGVFCLSMQCVVLIELLGTLTLPAAFAFTVYILVRAIIVRPVPLFPLLMLVLILGLPGVLILVTAHEWKYVLWMFIYLLSLPVWNFVLPLNAFWKFDDFRWGTTRLITTEGGNLRQDQVCSAERDEEHADFDRSRIRNMTFKAWIETQMPEFGPPTPLAPGSSLRKNYT

SEQ ID NO: 1362 - protein, 758 aa, Galactomyces geotrichum
  source 1..758: note = SBI04932_Beta-glucan synthesis-associated protein KRE6
MAINTRNLTSPDSPPNPQQPVHTTAAPSEDNVPEAPGFYFQPPRNEEVYPPPRNPFLTDSTSDEASLGSDQHLFVSENNNNNNNNIYSTSGSESTHGGGYPERSAYLPQETAPAAIDYPSGNYTSSYTPAGGLPTPMGMSTAAAVAGSAAAVAGASAQLLPNPSSRRSSASLNMLSAEFDRYPNRISSAAPSIMSMGAGHSLLRSGNSDLYLNKHNRDSSISNDSGVSSVSANGGGRPAGKFAFQSDFSPFGGYPTSSFPLHIDEKEADDYLHNPDPILDAKYDRKCQRLDKRGWLSLLAMLALLLGAIVLFIVYPVLTYTGHTSEHSRPTTAVEQYEVLTTYEYNILSAIRTTLVDPDTPQDAKSFTALDGSKWTLAFSEEFNKEGRTFYEGDDQFWTAPDIHYAATTDLEWYDPDASTTANGTLVLTMDAFKNHNLFYRSGMLQSWNKLCFTQGYLKVGAQLAGYGHVLGLWPGIWTLGNIGRPGYLGTTEGVWPYCYSECDAGITPNQSSTDGISYLKGQKLNACTCDGEDHPNPGVGRGAPEIDALEGTVSSDLKVGVVSQSLQLAPYDIWYMPDMNFIEIYNRTTTVTNTWFGGPLQQAISMASTLNTSWYEYSDTPGYQSYGFEYLNNDNTGYIRWFIGDTPTHALYAPSLGPNGNVGQRQISKEPMSIILNLGLSNSWVYIDWPSLVWPSHMRIDYVRIYQPPKAISITCDPSGYPTYDYIESHRDVYDNPNITSWEDTEYDWPKNKLTGC

SEQ ID NO: 1363 - protein, 742 aa, Galactomyces geotrichum
  source 1..742: note = SBI04932_Beta-glucan synthesis-associated protein KRE6
MNNQDNSRYQQQSQPLTGDRTYNSSSDDDLYGNNSQQHYQNTDVYPPPRNPFLSDHSDNNSIASDQYLQNDSQYNRNQQHVYNDDGYGSGSASDLLHPNNANQHGYPDQNVYIPRESTPLASQNDLYSGAVSSPMGMSTAAAVAGSAAAVAGASTLLAAAPKSRPSSTSLNVMSEFDRYPNRISSAQSVVSTPGANGSDNYHNGMRNSTFSNESGASSLSDSSVANPFVVNADFSPFGGYPATSFPLHIDEKEADDYLHNPDPILDAKNDRMCVKPDRRGMATIAALLFLVLGAIVLFIVYPVLTFTGLTEEHSNIVQSYEELTKYEYGILSGIRTSLVDPDTPDDALEHTALDGSKWPLVFSDEFNKEGRTFYDGDDQYWTAPDIHYAATTDLEWYDPDASITVNGTLMLTLDAFKNHNLYYRSGMVQSWNKLCFTNGYIEAKAQLAGYGHILGLWPGIWTLGNLGRPGYLGTTEGVWPYCYNQCDAGITPNQSSSDGISYLKGQKLNACTCPGSDHPNPGTGRGAPEIDVLEGTVSSDLKTGVVSQSLQLAPYDIWYMPDMNFIEIYNRSTTVTNTWFGGPLQQAISMASTLNTTWYEYGDSPSYQSYGFEYMNTDNTGYIRWFIGDTATHTLYAPALGPNGNIGQRDIAKEPLSIILNLGISTSWVYIDWPSLVWPSHLRFDHVRIYQPSDAISITCDPKDYPTYDYIQNHLDVYTNPNITTWDDTDYEWPKNKLTGCD

SEQ ID NO: 1364 - protein, 252 aa, Galactomyces geotrichum
  source 1..252: note = SBI04932_14-3-3 family protein 7
MPSREESVYLAKLAEQAERYEEMVQNMKDVATSGDELSVEERNLLSVAYKNVIGARRASWRIVSSIEQKEESKNNGEQVSLIREYRQKLEKELGNICKDILEILANNLIPSAKADESKVFYYKMKGDYHRYLAEFASGEEREKIANESLESYEAASVIANDTLTSTHPIRLGLALNFSVFYYEILNSPEKACQLAKQAFDDAIAELDNLTEESYKDSTLIMQLLRDNLTLWTSDMTELATENNEAAAPQAAE

SEQ ID NO: 1365 - protein, 1971 aa, Galactomyces geotrichum
  source 1..1971: note = SBI04932_1,3-beta-glucan synthase
MSANYNRPYADDQYNNADGHANTNANSHPNANQNQHDSYYADDYSQQQQQQQHGGYAQDGYDYNQQGHQGYYDDSQQGYYRDDESYYAQGGNQQGHQHNQYMDDDGYPEGSYAAGPVDPYASSSQQQQQLQQQYGGYQQPNKGQLLNSDDGSETFSDFTMRSDMNRAAEMDYYGNNNNQYMPPGEGQDGYVPSAESRQAYRTTASSQMSYNGNRSSGASTPIYGLDYQNIPAGTRSREPYPAWTSENQIPLSKEEIEDIFIDLANKFGFQRDSMRNMYDYFMCLLDSRASRMTPNQALLSLHADYIGGENANYRKWYFAAQLDLDDQVGFRNMKLGKTNKRTRKARKKVKQDDPNADPQKTLEELEGDNSLEAAEFRWKNHMNQMSQHERARQIALYLCCWGEANQVRFTPECLCFLFKCADDYFLSPECQARTEPVEEGDYLNRIITPIYMFIRDQGYEVRDGKFVKRERDHGKVIGYDDVNQLFWYPEGIERIIFEDGTRLVDIPSSQRFSKLGEVVWDKVFFKTYIETRSWFHMAVNFNRIWIIHITMYWFYVAFNSPTIYTPNYSQLANNPPLAQCRWAACAIGGVIATFFQIVATLSEWAFVPRQWSGAQHLSKRLMFLILIFILNLITPVYVFGYIGISTYSKSAHVVSVVGFFIAVFTFLFFSVMPLGALFGSYLGRNTRRYVASQTFTASFHKLKGNDMWLSYGLWVVVFALKLVESYFFLILSLRDPIRDLSTMTMTRCVGEVYFGDVLCRHQAHITLGLMYFLDIVLFFLDTYLWYVIINSIFSVARSFYLGISIWTPWRNIFSRLPKRIYSKILATTDMEIKYKPKVLISQIWNAIVISMYREHLLAIDHVQKLLYHQVPSEVEGKRTLRAPTFFVSQDDNSIESEFFPDNSEAERRISFFAQSLSTPIPEPLPVDNMPTFTVFVPHYSEKILLSLREIIREDDQFSRVTMLEYLKQLYPVEWDCFVKDTKILAEETSSFNESSENLDKESSDEKDSIKSKIDDLPFYCIGFKSAAPEYTLRTRIWASLRSQTLYRTVSGFMNYSRAIKLLYRVENPEVVQMFGGNTEKLERELERMARRKFKFLVSMQRLTKFKPDEMENTEFLLRAYPDLQIAYLDEEPPLNEGEEPRLYSALIDGHCEIMENGRRRPKFRVQLSGNPILGDGKSDNQNHAIIFCRGEYLQLIDANQDNYLEECLKIRSVLAEFEELNVEHVNPYTPTLPSSTSGESHEVSNPVAILGAREYIFSENIGILGDVAAGKEQTFGTLFARTLAQIGGKLHYGHPDFLNATFMLTRGGVSKAQKGLHLNEDIYAGMTALLRGGRIKHCEYYQCGKGRDLGFGSILNFTTKIGTGMGEQILSREYYYLGTQLPLDRFLSFFYAHPGFHVNNLMIITSVQLLMLVLLNIGALNNQTITCLYDRNKPITDPHIPLGCYNIQPVLDWVRRCILSIFIVFFIAFIPLVVQELTERGLWRATVRFARHFGSLSPFFEVFVCQIYANSMLMDLAFGGARYIATGRGLATARIPFSVLFSRFAGDSIYLGARAFTMLLFATVSMWQAALLWFYITLFAMCISPFIYNPHQFAWTDFFIDYRDYIRWLSRGNNKWHRNSWIGYVRLTRTRITGFKRAVTGDVSEKGSGDVPRAPFTNLFMTEILVPVVVAAAAFVPYTFINSQNGVANVEPVNSVLRVIICTLAPIVINAGALMVLVFISCCAGPLLGVCCKKTSSVMAGIAHGISVIVHIVFFEVMWLLQGWNWTSALLGMITCMSIQRLLLKLLTIFLLTREFKHDSSNRAWWSGKWYSAGLGWMTMTQPLREFVCKIVEGSHFAADFVLGHCLLFVQLPLLCIPMIDRWHSMLLFWLRPSRQIRPPIFSLKQNKLRKRMVRKYATLYFGLLLLFLILIIAPAVAGKSMDTSSITKNLPEFAKGLVQPTGQDNNDTGDNAPSTVETVTPVISNWSTKP

SEQ ID NO: 1366 - protein, 322 aa, Galactomyces geotrichum
  source 1..322: note = SBI04932_Ribose-phosphate diphosphokinase
MVNSSSNSIKLLAGNSHPELAKAVASRLGLELSRIAVSQYANQETSVTIGESVRDEDVFIIQTGCGEVNDYLMELLIMIHACKTASARRITAVIPNFPYARQDKKDKSRAPITAKLMANMLQTAGCNHVITMDLHASQIQGFFDVPVDNLYAEPSTLNYIRQNIDYKNAIIVSPDAGGAKRAASLADKLDLNFALIHKERQKANEVSRMVLVGDVQDKICILVDDMADTCGTLVKAADTLISHGAKSVIALVTHGIFSGAAVERINNSPLERVVCSNTVPHDAMQQVCPKLDHIDISPTLAESIRRLHNGESVSYLFTHAPI

SEQ ID NO: 1367 - protein, 978 aa, Galactomyces geotrichum
  source 1..978: note = SBI04932_Glutamine--fructose-6-phosphate transaminase
MNTDSTLKNLLWNGSISVRLVLSQDEARNFVDYDYYINVPRLSYLHLQLPSALQFFRPLLRHPEDADMLDWWLEFEGVPIKWNWPIGLSFDLLTNHDPNKGPDAYAEIVPWTLILHKKNYPKDRILSLDDGIETVRSYWLNQIKEASYIRYGNSKAVLNLSKDDSDSLWSHLMQNNFVKLFAIVERQFAASPRNLPLRIYLPISNSVLQYPLPHDPNQTLGAALNACMPRLFPSKRTCVIARPVMHGVELPLRTPVGALFESGAVFCDGGIFGYINYLVPQTRGNIINTLLEGLQRQEYRGYDSAGLAVDGDELLSNVGEPYQPRSVLIFQQVGKVKLLKEHIAAQNINTETVFESHSGIAHTRWATHGQPKTVNCHPQRSDVNNEFTVVHNGIITNYREIKAFLESKGFKFESETDTEAIAKLTKYIYDSNIKEHGYDRKPDFSELAKLVIKELEGAYGLLIKSVHYPDELVATRKGSPLLIGVKTEKKLKVDFVDVEFVDAETEQNTGSLLAPQGVSAVPSLTVPGNTLQDHLRHSQSRAFLSEDNTPRPIEFFLASDPAAVVEHTRKVLFLEDDDIAHIYDGELHIHRVRRDVNEPGTRAIETLELELQQIMKGKFTHFMQKEIFEQPDSVINTMRGRVDFENNTVQLGGLRSWLTTIRRCRRIIMIACGTSYHSCLATRSIFEELTEIPVSVELASDFLDRRSPVFRDDTCVFVSQSGETADTIMALQYCLERGALTVGIVNSVGSSISRQTHCGVHINAGPEIGVASTKAYTSQYIALVMVALSLSDDRVSQLERRKEIIQGLSNISEQIAEVLKLDDHIRDLCEKDLLRHKSLLLLGRGYQFATALEGALKIKEISYMHSEGVLAGELKHGVLALVDENLPIIIMATRDSLFPKVSSAIEQVTARSGNPIIICNKGDSFGNGLKRLEVPQSVDCLQGLLNVIPLQLMSYWLAIKHGHDVDFPRNLAKSVTVE

SEQ ID NO: 1368 - protein, 1970 aa, Galactomyces geotrichum
  source 1..1970: note = SBI04932_1,3-beta-glucan synthase
MSQNYNNRTYEDERYGDSQQDSYSNSEYQNQQQQPPPPQQQPFEYQPHTISGQHGYYDDHGNYYDQDAYYGQAAQGPNDPPFHGHQQYDNDNFYPDDPYGASDIDPYASSAQQNRQQQQQHMNQQQTNYTQPKGISDENSETFSDFTMKSGMARTAGIDFYGTAGDPRHNSLPQNNAMEIMGEDGYISHGGSQQAFRNTPSSRFSYGGNRSSGSSTPIYGLDYSGNLPAGQRSREPYPAWTAENQVSITKEEIEDIFIDLTSRFGFQRDSMRNMYDHFMVLLDSRASRMTPNQALLSLHADYIGGDNANYKKWYFAAQLDLDDQIGFRNMKLGKTNRRTRKARKKSKLDDPNADTQKTLEELEGDNSLEAAEYRWKAQMNQMSQHERARQIAMYLCCWGEANQVRFTPECLCFIYKCADDYFLSDECQSRTEPVPEGDFLNRVITPLYTFIRDQNYEVIEGKFVKREKDHSKVIGYDDVNQLFWYPEGIERIVLEDGTRLVDIPSSQRYGKLGEVTWTNVFFKTYKESRSWFHLAVNFNRIWVIHLSMFWFYAAFNSPTLYTPNYYQLLNNPPLAQTRWAACGLAGVVATVIQIVATLSEWAFVPRKWAGAQHLTRRLLFLILILLVNLISPIYVFGYITISRYSKSAHIVSIVGFFVAVATVLFFSVMPLGGLFGSYMNKKTRRYVASQTFTASFHKLSGNDMWVSYGLWVCVFVAKLVESYFFLILSLRDPIRDLSTMTMTRCTGEVYFGDTLCRQQAHITLGLMYLTDIVLFFLDTYLWYIICNSIFSVARSFYLGISIWTPWRNIFSRLPKRIYSKILATTDMEIKYKPKVLISQIWNAIIISMYREHLLAIDHVQQLLYHQVPSEVEGKRTLRAPTFFVSQDDNSIESEFFPRNSEAERRISFFAQSLSTPIPEPLPVDNMPTFTVFVPHYSEKILLSLREIIREDDQLSRVTLLEYLKQLHPVEWECFVRDTKILAEETSGFSLENSADNLEKEVSDEKSSIKSKIDDLPFYCIGFKSAAPEYTLRTRIWASLRSQTLYRTVSGFMNYSRAIKLLYRVENPEVVQMFGGNTEKLERELERMARRKFKFLVSMQRLTKFKSEEMENTEFLLRAYPDLQIAYLDEEPPLNEGEEPRLYSALIDGHCEIMENGRRRPKFRVQLSGNPILGDGKSDNQNHAIIFYRGEYIQLVDANQDNYLEECLKIRSVLAEFEELNVEHVNPYTPTLPSSTSGESQETKCPVAILGAREYIFSENIGILGDVAAGKEQTFGTLFARTLAQIGGKLHYGHPDFLNAIFMTTRGGVSKAQKGLHLNEDIYAGMNALLRGGRIKHCEYYQCGKGRDLGFGSILNFTTKIGTGMGEQILSREYYYLGTQLPLDRFLSFFYAHPGFHINNLFIIASVQLFMIVMLNIGALANQSIICLYDKNKPLTDPQIPTGCYNLRPTLDWVQRCILSIFIVFFIAFIPLVIQELTERGLWRAFVRFTRHFASLSPFFEVFVCQIYANSLLMDLTFGGARYIATGRGVATARIPFSVLYSRFAGDSIYLGARSMMMLLFATVSMWQAALLWFYITLFAMCISPFLYNPHQFSWTDFFIDYRDFIRWMSRGNNKWHRNSWIGYVRLTRTRITGYKRRISGDISERAISDVPRAKFTSLFFTEILIPIIVAAAAFVPYTFINSQNGVSDAEPVNSVLRVVICTLAPIAINAGALLVLASISCCAGPLLGVCCKKTSAVMAGIAHGISVIVHIVFFEVMWLLQGWRWTPALLGMITCMAIQRLLLKIFTIAFLTREFKQDNSNCAWWSGKWYSAGLGWMTMTQPLREFVCKLAEASYFAADFVLGHCLLFVQLPLLCVPMIDRWHSMLLFWLRPSRQIRPPIFSLKQNKLRKRMVKKYASLYFAILLLFLILIIAPAAAGKSMDTSSISKNLPDFADGLFQPVDQNNNDTGENAPSTVITVTPTLSNFSTMP

SEQ ID NO: 1369 - protein, 772 aa, Galactomyces geotrichum
  source 1..772: note = SBI04932_1,3-beta-glucan synthase
MLSSSTVCLKIRSVLAEFEELNVEHVNPYTPTLPSSTSGESQETKCPVAILGAREYIFSENIGILGDVAAGKEQTFGTLFARTLAQIGGKLHYGHPDFLNAIFMTTRGGVSKAQKGLHLNEDIYAGMNALLRGGRIKHCEYYQCGKGRDLGFGSILNFTTKIGTGMGEQILSREYYYLGTQLPLDRFLSFFYAHPGFHINNLFIIASVQLFMIVMLNIGALANQSIICLYDKNKPLTDPQIPTGCYNLRPTLDWVQRCILSIFIVFFIAFIPLVIQELTERGLWRAFVRFTRHFASLSPFFEVFVCQIYANSLLMDLTFGGARYIATGRGVATARIPFSVLYSRFAGDSIYLGARSMMMLLFATVSMWQAALLWFYITLFAMCISPFLYNPHQFSWTDFFIDYRDFIRWMSRGNNKWHRNSWIGYVRLTRTRITGYKRRISGDISERAISDVPRAKFTSLFFTEILIPIIVAAAAFVPYTFINSQNGVSDAEPVNSVLRVVICTLAPIAINAGALLVLASISCCAGPLLGVCCKKTSAVMAGIAHGISVIVHIVFFEVMWLLQGWRWTPALLGMITCMAIQRLLLKIFTIAFLTREFKQDNSNCAWWSGKWYSAGLGWMTMTQPLREFVCKLAEASYFAADFVLGHCLLFVQLPLLCVPMIDRWHSMLLFWLRPSRQIRPPIFSLKQNKLRKRMVKKYASLYFAILLLFLILIIAPAAAGKSMDTSSISKNLPDFADGLFQPVDQNNNDTGENAPSTVITVTPTLSNFSTMP

SEQ ID NO: 1370 - protein, 708 aa, Galactomyces geotrichum
  source 1..708: note = SBI04932_Glutamine--fructose-6-phosphate transaminase
MCGIFGYVNYLVPQTRGHIVSTLIEGLQRQEYRGYDSAGLGVDGDERLTDVGEFNPPRNVQIFHQVGKVHLLKEHIDAQNINKDEVFECHAGIAHTRWATHGQPKTINCHPQRSDLNNQFIVVHNGIITNYREIKSLLESKGYRFESETDTEAIAKLTKFIYDQYIKEHGIDNKPDFSDLAKQVVKELEGAYGLIIKSVHYPDELVATRKGSPLLVGVKTEQKLKVDFVDVEFVEADAEANTGSLLSGGAGNLLAVPGSAVSEPLRHSQSRAFLSDDNTPRPIEFFMASDPAAVVEHTRKVLFLEDDDIAHISDGQLHIHRVRRDVNESPTRAIETLEMELQQIMKGQFSHFMQKEIFEQPESVINTMRGRVDFDNNTVQLGGLRSWLTTIRRCRRIIMIACGTSYHSCLATRSIFEELTEIPVSVELASDFLDRRSPVFRDDTCVFVSQSGETADTILALQYCLERGALTVGIVNSVGSSISRQTHCGVHINAGPEIGVASTKAYTSQYIALVMVALSLSDDRVSKVDRRREIIQGLKNISSQIKEVLGLDSHIKKLCDTDLASHKSLLLLGRGYQFATALEGALKIKEISYMHSEGVLAGELKHGVLALVDENLPIIVMATRDSLFPKVMSAIEQVTARSGNPIIICNPGTSLADGLQRLEVPQSVDCLQGLLNVIPLQLMSYWLAIKYGYDVDFPRNLAKSVTVE

SEQ ID NO: 1371 - protein, 370 aa, Galactomyces geotrichum
  source 1..370: note = SBI04932_Ribose-phosphate diphosphokinase
MSTNSIKILAGDVHRNLAELVANRLGQKLCKVNVFRDSNRETSITIGESVRDEDVYIVTQIGSGDVNDRILELLIMVNACKTASARRITAVLPNFPYARQDRKDKSRAPITAKLMANMLETAGCNHVITMDLHASQIQGFFDVPVDNLYAEPSVVNYIKQNIDYQNAIIVSPDAGGAKRAAALADRLDLNFALIHKERARANEVSRMVLVGDVTDKICILVDDMADTCGTLAKAAETLLGHNARSVIAIVTHGILSGRATEIINKSKLQSVVCTNTVPLEGKDLQCSRLATIDISGVLAESIRRLHNGESVSYLFRNAPHVNWPCFRRTSSCDCPDGRVSTCNILFFFLFSFRYSFFLSSFSPFCKPTYI

SEQ ID NO: 1372 - protein, 264 aa, Galactomyces geotrichum
  source 1..264: note = SBI04932_14-3-3 family protein 7
MTSERETKTFLARLCEQAERYDEMVEYMKEVAKSGEELSVDERNLLSVAYKNVIGTRRASWRIISTIEQKEELKGANSTHLQEVKNYRLKIEKELEEVCNDVLSVLTDYLLPKAESGESKVFYYKMKGDYHRYLAEFASGEKRTKAADAAHEAYKKATEIAQTELTSTHPIRLGLALNFSVFYYEILNAPDLACQLAKQAFDDAISELDTLSEDSYRDSTLIMQLLRDNLTLWQSDLDALHNKGEESASGETKKEDADEESKDN

SEQ ID NO: 1373 - protein, 431 aa, Galactomyces geotrichum
  source 1..431: note = SBI04932_succinate--CoA ligase [ADP-forming] subunit beta
MIRNNAFRAVRSAIAHQKRSLSLHEYRSANLLKSYGVGIPAGEAAVTPSEAEAVAKKLNLEDMVIKAQVLTGGRGKGVFDSGLKGGVKLISSPLEAKMYAEQMLHHKLVTKQTGPAGKEVTAVYIVEREFVRREAYVAILMDRASQGPIIVASAQGGMDIEGVAAETPEAIKTFKINIHEGVTDEIATAVAKTLNFSSKAIPEAAETIKNLYRVFDERDATQIEINPLSETTDNKVLAMDAKLGFDDNAAFRQEEVWSWRDLTQEDPQEIEAAKFGLNFIKLDGSIGCLVNGAGLAMATMDIIKLNGGDPANFLDCGGGATEKAIEKAFELITSDNKVTAIFVNIFGGIVRCDNIAKGLIAVTRHMDINIPIVARLQGTNLAEAQELLNNSGLKIFSFVDLDEAAQKVCQLSKVVKMAREIDVNVSFELPL

SEQ ID NO: 1374 - protein, 328 aa, Galactomyces geotrichum
  source 1..328: note = SBI04932_succinate--CoA ligase [ADP-forming] subunit alpha
MSRTIRSSAKLARQFSTSSQRLNYADTAKNLKINSDTKVLFQGFTGKQGTFHAQQALEYGTKIVGGTNPKKAGQTHLGLPIFGNLADGIRETGASASAIFVPPPVAASAILEGIEAEIPLIVCITEGIPQHDMVRVVDALKTQSKTRLVGPNCPGIIAPEQCKIGIMPSAIHKRGRIGVVSRSGTLTYEAVNQTTNVGLGQSLVIGIGGDPFSGTNFIDALKVFLEDEETDGIIMIGEIGGTAEEEAAEFLKSYNLTRAVPKPVTSFIAGVSAPPGRRMGHAGAIISGGKGDAKSKISALEAAGVVVEPSPARLGKALYQEFVRRDLL

SEQ ID NO: 1375 - protein, 244 aa, Galactomyces geotrichum
  source 1..244: note = SBI04932_succinate dehydrogenase
MFPARLAFRAASSSLKVAAASARGLATEAAQPAVKAPPTTGPMVLDAILRIKNEQDSTLTFRRSCREGICGSCAMNINGRNTLACLCRVDQDLKEDVKIYPLPHMFVVRDLVPDLTQFYKQYKSIEPYLQRDSVPEDGRENLQSIEDRKKLDGLYECILCACCSTSCPSYWWNSAEYLGPAVLMQAFRWMIDSRDQAGAARRARLENSMSLYRCHTIMNCSRTCPKGLNPGLAIAKIKKSMALA

SEQ ID NO: 1376 - protein, 270 aa, Galactomyces geotrichum
  source 1..270: note = SBI04932_succinate dehydrogenase
MISSSLLRSSRLLASSLRPAARTLATAAAAEAKPVAMKKFQIYRWNPDTPEKKPELKTYEVDLNSTGPMILDAILRIKNEQDSTLTFRRSCREGICGSCAMNIDGRNTLACLCRIDKDTSKDTKIYPLPHMFVVRDLVPDLTQFYKQYKSIEPYLQRDNVPADGKENLQSIEDRKKLDGLYECILCACCSTSCPSYWWNSAEYLGPAVLMQAYRWMIDSRDQAGAARRARLENSMSLYRCHTIMNCSRTCPKGLNPGLAIAKIKKSMALA

SEQ ID NO: 1377 - protein, 641 aa, Galactomyces geotrichum
  source 1..641: note = SBI04932_succinate dehydrogenase
MLSALKRSCLRNQANNLRSFHSSRAVGKVFAQDHVKGTEASSHLTKKYAVIDHEYDAVVVGAGGAGLRAAFGLAEAGFNTACISKLFPTRSHTVAAQGGINAALGNMHKDDWHWHMYDTVKGSDWLGDQDAIHYMTREAPKSIIELEHYGVPFSRTEEGRIYQRAFGGQSKEYGKGGQAYRTCAVADRTGHALLHSLYGQSLRHNTNFFIEYFAMDLLMQDGKCVGVIAYNQEDGTIHRFRAHKTVIATGGYGRAYFSCTSAHTCTGDGNAMVTRAGLPQQDLEFVQFHPTGIYGSGCLITEGSRGEGGYLLNKNGERFMERYAPTAKDLASRDVVSRSMTLEIREGRGVGPENDHIYLQLSHLPASVLQERLPGISETAAIFAGVDVTKEPIPVLPTVHYNMGGIPTKWTGEAITVDENGNDVVVPGLYACGEAASVSVHGANRLGANSLLDLVVFGRAVAHTISEQLTPGTPHGPAPADLGKESIENLDKMRTADGPLSTAEIRLAMQKVMQTDVSVFRTQSSLEDGVRRITEVDRLLPQIGTKDRSMIWNSDLVETLELQNLLTCAMQTAYSAVARKESRGAHAREDFPDRNDKEWMKHTLSWQHKPGQEIELKYRDVIYNTLDANECASVPPAKRVY

SEQ ID NO: 1378 - protein, 662 aa, Galactomyces geotrichum
  source 1..662: note = SBI04932_acetyl-coenzyme A synthetase 2
MTQPVVHEAHNIVARHTPKAFFDKHPSQPHISGLEHYKELYQQSIENPNKFFGDLAHELLSWDRDFETVSSGGFEHGDIAWFLEGKLNASYNLVDRHAAKNPDKVAIIYEADDAADSRKITYGELLREVCKVAGVLKSFGVQKGDSVAVYLPMIPEALIALLAISRIGAVHSVIFAGFSSGSLKDRVNDAKSKVIITTDEGKRGGKTVYTKKIVDEGLKDTPSVEKVLVYKRTGNDVPWTTGRDFWWHEEVSKHRPYVAPTPVSAEDPLFLLYTSGSTGSPKGVVHVTGGFLLGAAATCKYVFDIHPEDTLFTAGDVGWITGHTYAFYGPLLLGATTVIFEGTPAYPSYSRYWEIVEKYKVTQFYVAPTALRLLKRAGEDYIKKHDLSSLRTLGSVGEPIASEIWEWYNEHIGNNDCHISDTYWQTETGSHIIAPLAGVIPMKPGSATLPFFGIDLVIIDPVSGQEIKGNDVEGVLAIRKPWPSIARTVFNSHQRYLETYMKPYPGFYFTGDGAGRDHEGYYWIRGRVDDVVNVSGHRLSTAEIEAALVAHPAVAEAAVVGVADELTGQAVIAFASLKDVEATPELRKELVLQVRREIGPFAAPKSVIVVDDLPKTRSGKIMRRILRKIVSGEADSIGDTSTLSEPQVVGEIIDAVSKQYKI

SEQ ID NO: 1379 - protein, 661 aa, Galactomyces geotrichum
  source 1..661: note = SBI04932_Acetyl-coenzyme A synthetase 1
MAPVVVESHNIVKIAPPKEFRDNHPTEPHLKDEQHYEELYKESITNPEKFFGNLARELLSWDKDFQTVKNGGFEYGDAAWFLEGELNASYNAVDRHALKNPDKVAIIYEADEPGKGYNVTYGELLREVSRVAATLASFGVKKGDTVAVYLPMIPEAIITLLAIVRLGAIHSVVFAGFSSGSLRDRIIDADSRVVITTDESVRGGRIIETKKIVDEALKGCPNVKHTLVFKRTGNESIPWNQDRDYWWHEEVARHRPYYPPVSVNSEDPIFLLYTSGSTGTPKGVVHSTAGYLLGAASTTKYVFDLHPDDILFTAGDVGWITGHTYCCYGPLLLGATTVVFEGTPAFPNFSRLWDIIDEHKVTQFYVAPTALRLLKRAGLDWIHHDLSSIRTLGSVGEPIAPDVWQWYNDNIGKGKAHICDTYWQTETGSHIISPLAGVTHTKPGSASFPVFGIDPVIIDPVSGEELTGNDIEGVLAIRSPWPSMARTVWNSHNRYMDTYLKPYPGYYFTGDGAGKDHEGYYWIRGRVDDVVNVSGHRLSTAEIEAALIEHPAVAESAVVGINDDLTGQAVNAFVALKSKPADVDAIKKELILQVRKSIGPFAAPKNVIIIEDLPKTRSGKIMRRILRKVLSGEEDQLGDISTLSNPDAVSNIIDVVKAGRK

SEQ ID NO: 1380 - protein, 444 aa, Galactomyces geotrichum
  source 1..444: note = SBI04932_isocitrate dehydrogenase
MSNTNISASNRLKKLMEHLSPADAQRISPNMAASSTFQKIKVQDPIVELDGDEQTRIIWQFIKDKLIFPFLDVDLKYYDLGIEYRDQTDDQVTIDAANAILKYKVGVKCATITPDEARVEEFKLKKMWLSPNGTIRNILGGTVFREPIVIPRIPRLIPGWEKPIIIGRHAHGDQYKAQDFVVPGAGSVELVYKPANGGAEERIKVFDYKDSGVALAMYNTDDSITGFAHSSFKLALEKKLNLYMSTKNTILKKYDGRFKDIFQELYDNVYKKEFDAAGIWYEHRLIDDMVAQMIKSSGGYIIAMKNYDGDVQSDIVAQGFGSLGLMTSVLVTPDGETFESEAAHGTVTRHYRQHQQGKETSTNSIASIFAWTRGISQRGKLDKTPEVVAFADALEKATLDTVDVDGIMTKDLALACGKTDRSSYVLTEEFIDAVANRLKKDLKY

SEQ ID NO: 1381 - protein, 439 aa, Galactomyces geotrichum
  source 1..439: note = SBI04932_isocitrate dehydrogenase
MAPQIRLASLASQLSGARRAAFPVSMRFSSSFQKIKVQNPIVELDGDEMTRIIWKSIKDKLIHPYLDVDLKYYDLGIQERDRTNDKITVDAAEAILKHQVGVKCATITPDEQRVKEFNLKKMWLSPNGTIRNILGGTVFREPIVIPRIPRLIPGWEKPIIIGRHAHGDQYKAQDYVVPEAGSLELVYKPANGGEAKTIKVYDYKGPGVALAMYNTDESITGFAHSSFKLALEKGLNLFMSTKNTILKKYDGRFKDIFQELYDTQYKAQFEAQGIWYEHRLIDDMVAQMIKSKGGYIIALKNYDGDVQSDIVAQGFGSLGLMTSVLVTPDGKTFESEAAHGTVTRHYRQHQQGKETSTNSIASIFAWTRGISQRGKIDNTPAVTEFATALEKATLDTVQVDGIMTKDLALACGKTDRSSYVLTEEFIDAVAKRLKADLKA

SEQ ID NO: 1382 - protein, 332 aa, Galactomyces geotrichum
  source 1..332: note = SBI04932_malate dehydrogenase
MSFVARRAFSSSSFNPSKVAVLGAAGGIGQPLSLLLKLNKDVTGLSLYDLRGTPGVAADLSHIPTNSKVTGYTPEKGGLKEALSGVEVVVIPAGVPRKPGMTRDDLFNTNASIVRDLAKGIAEFAPKAKVLIISNPVNSTVPIVAEVLKSKGVYDPKKVFGVTTLDVIRASRFISEVKGTNPAEETVTVVGGHSGHTIVPLISQSGHPDISGETLDALVNRIQFGGDEVVKAKDGAGSATLSMAQAGARFAGSLLKAAKGETVVEPTYVESPLFKDQGVDYFSSKVTLGPEGVKEIHPLGKLNAYEEKLIATALEDLKKNIKKGVDFVAQNP

SEQ ID NO: 1383 - protein, 568 aa, Galactomyces geotrichum
  source 1..568: note = SBI04932_Pyruvate decarboxylase
MSSSTQTDNDTIPVGTYLFNRIRQLGINSIFGLPGDFNLALLDYISEVEGLRWVGNTNELNAGYAADGYSRLKSLAVLITTFGVGELSTINAIAGAFAEHVGLLHIVGVPAQSSENKKLLLHHTLGNGDYKVYARISKELSKKVIILEDSETAPHRIDDALRTAFISQRPVYLAIPTNIGELPVRKELLETPIDLVPPSNDPESEKEVVDRVLRLIEHANNPVILVDACANRHDVREETARLAEVTQFPVFTTPMGKSAFDEDNDRFGGVYIGSLSSPEVAKVVESSDLILSVGALLSDFNTGSFSYGYNTNNLVEFHSDHIKIKRATYEGVSMKPVLRELATRITPRDPALAVPVPKAQAVQTAPKNTKLTQDYLWANLSSFLRPGDVIVSETGTSSFGITKTTFPNHTVGISQVLYGSIGYSVGAALGAALAIEEIDPSRRVILLVGDGSLQLTAQAISTMIRWNLNPYLFVLNNDGYTIERLIHGPTSSYNDINPWRYTQLLEVFNAQNYQNYTIKTTGELDDVFESEEFAKPNKIRLIELVLPRLDAPLALVKQAEITSKTNAS

SEQ ID NO: 1384 - protein, 562 aa, Galactomyces geotrichum
  source 1..562: note = SBI04932_malate synthase
MSLEGVQVLATLDNSSPYPSGTTPRDILTKKALQFLVILQRSFNNRRKALLTARVERQKSIEAGNLPTFLEETKHIREDPSWLGPTPGQGLIDRRVEITGPPDRKMIINALNSDVSTYMSDFEDSLAPTWENVIWGQVNLYDAVRNNANFTAADSGKEYKIKGPDERSNSVPTIIVRPRGWHMVEKHILVDGEPISASIFDFGLYFFHNAQALIDSGKGPYYYLPKMESYHEARLWNDIFNVAQDYFSISRGTIRATVLIETLTGAFEMEEIIFELRQHSAGLNCGRWDYIFSTIKKLRTYKDKVLPDRGDVTMTVHFMASYVKRLIQVCHKRGVHAMGGMAAQIPIKNDSATNDAAMGRVRADKLREATAGHDGTWVAHPALAYIANDVFNTYMIAPNQIFYRPEKDVKGYTFAEGDDLLNTNIEGGKITEAGIRKNIYIGLSYMEAWLRGLGCVPIDSLMEDAATAEVSRAQLNQWVLHGVTTVDTKVQVTPELNAKILKEETDKLAAKAGAGNKFELAAKYFLPEITGKTFSDFLTTLLYDEIASTENSKPLDLATLAP

SEQ ID NO: 1385 - protein, 542 aa, Galactomyces geotrichum
  source 1..542: note = SBI04932_malate synthase
MVVPTNILFNGIEVRAPIPDNARHILTKDAVAFLATLHRTFNGRRKELLARRVERQKEIDNGALPDFLPETKHIREDPIWQGAPPAPGLEDRRVEITGPTDRKMVINALNADVYTYMSDFEDSSTPTWNNMIGGQVNLYDAVRRTISLQQGSKSYKLRTDRPVPTLIVRPRGWHLDESHFLVDGEPISGGIFDFGLYFFHNAKEAIAQGFGPYFYLPKMESHLEARLWNDIFKVSQDWIGIPRGTIRGTVLIETILGVFEMDEIIYELREHSSGLNCGRWDYIFSFIKKLRNHPEFVLPERNDVTMTVPFMSSYVKLLIQTCHKRGVHAMGGMAAQIPIKDDAQANKVAMEGVYKDKLREALAGHDGTWVAHPQLAHIALEVFNKHMPTPNQIFLRREEVHVTARDLINPYIPGGKISEAGIRKNLFIGLGYMEAWLRGVGCVPINYLMEDAATAEVSRSQLNQWVKHGVTTSEGKKVTKDYILALLADETKKAEQSGPKGNKFAEAARYLKPEITDEKYSDFLTTLLYDKVTTVDSVAAKL

SEQ ID NO: 1386 - protein, 525 aa, Galactomyces geotrichum; identical to SEQ ID NO: 1359
  source 1..525: note = SBI04932_Potassium-activated aldehyde dehydrogenase

SEQ ID NO: 1387 - protein, 372 aa, Galactomyces geotrichum
  source 1..372: note = SBI04932_alcohol dehydrogenase
MLRTISRLASSPARRNFIRLNSTFVVPRTQKAIVFEKNNGPLLYKTDWPVPTPVADEILVNVKYSGVCHTDLHAWHGDWPLPTKLPLVGGHEGAGVVVARGSAVTNFELGDYAGIKWLNGSCLSCEFCLKGAESSCSDAILTGYTHDGTFQEYATAKAIHAAKIPKQTDLAQIAPILCAGITVYKALKTSTATPGQWVAITGAGGGLGSLAIQYAKAMGLRPIAIDTGAAKAELCKSLGAEVFIDFKATSDLSAEIKQATHGGPHAVIHVAVSEAAIEVSTDYVRPTGTIVLVGMPAGAVARSSVFNHVVKAIDIKGSYVGNREDTVEALDFFSRGLVSSPINIVGLSELASVYEKMEKGEIVGRFVLDTTC

SEQ ID NO: 1388 - protein, 350 aa, Galactomyces geotrichum
  source 1..350: note = SBI04932_alcohol dehydrogenase
MAPIPKTQKALVFETNGGPLLYKTDYPVPTPASDEILVNVKYSGVCHTDLHAWKGDWPLGTKLPLVGGHEGAGVVVAKGENVTNFEIGDYAGIKWLNGSCLGCEFCLKGAESNCAAAILSGYTHDGSFQEYATAKAVHAAQIPQGTDLAKISPILCAGITVYKALKVSDARPGEWVAITGAGGGLGSLAVQYAKAMGLRVIGIDTGDAKAQLVKELGGEAFIDFATTKDIVKDVVAATNGGPHAVIHVAVSEKAIGVSTEYVRPTGTIVLVGLPAGAVAKSEVFSHVIKTISIKGSYVGNRADSAEAIDFFTRGLVHSPIKIVGLSELEHVYELMEKGQIVGRYVLDTSK

SEQ ID NO: 1389 - protein, 523 aa, Galactomyces geotrichum
  source 1..523: note = SBI04932_Potassium-activated aldehyde dehydrogenase
MSSRAFSAASRAVRLTKSAATKSASRFYSSGFPLSTQVTLPNGIKYDQPTGLFINNEFVPSISGKTLKVENPATEEVLTEVYEADASDVDVAVDAAEAAFKTWSVMQPSERGRALYRLADLIERDLEVLASIECADNGKAIALARGDVGLVAKVIRYYAGYADKITGTVIETNDGHFTYTRREPIGVCGQIIPWNFPLLMWSWKIGPALATGNTVVLKTAESTPLSALYASKLAVEAGIPPGVINIISGYGSTGAAISNHMKIKKVAFTGSTNTGRAILKSAAESNLKKATLELGGKSPNIVFSDADIPNAIEMTNLGIFFNSGEVCCAGSRIYVQDTIYEKFLQQLKERTEANKVGNPFDPETFQGPQTSKTQLDKILHYVDVGKQDGATLVTGGYRIDRPGWFVAPTVFADVKEDMKVVKEEIFGPVVTVSKFSSVDEVIELANNSEYGLAAGIHTTDVNKAIDVSNRLNAGTIWINTYNNFHEAVPFGGYGQSGIGREMGEQALENYTQHKAVRIKIEKK

SEQ ID NO: 1390 - protein, 659 aa, Kazachstania servazzii
  source 1..659: note = SBI05419_NAD-dependent malic enzyme
MISARTANIGSTVSARQCIKTVQWRVYSAKTRPNQATATRDSLFSNLNNGFHTPNHITSFKSSSSYLFQGVKSQKNKLSVNDDIECPLSGSQLLNSPLFNKGSAFTERERADFKLNGLLPPKINTLEEQLERSYKQLCMLKTSIAKNDYLTNLRVTNKTLYFALVKRHIMELVPIIYTPTEGDAIATYSDRFKKTEGVFLDITDPDSIEERLSAYGGKTKDIDYIVVSDSEGILGIGDQGVGGVRISISKMALMTLCGGIHPGRVLPICLDVGTNNQKLVNDELYLGNRFPRVQGPEYDAFISKFINAVKKLYPTAILHFEDFGVKNARRILEKYRYEVPCFNDDIQGTGAVVMASLIAALKHTHRELRDTKVLVYGAGSAGLGIADQVVSHMVTHGVPLEEARSKIYLMDRRGLILESYKDGSTEQQHVYAKRDEEWSGINTKSLFNVVSQVKPTCLVGCSTQASAFTKEIVEEMYKHNSRPIIFPLSNPTRLHEAIPADLMEWTNNDALVATGSPFEPVNGYRISQNNNCYSFPGIGLGAVLSRASCISDKMISAAVDELASLSNLKEGDSSPGLLPGLEVITHTSSRIAAAVILKALEEGVATIEEQLDPSNPGQTIKVPREFGKCVEWVKDQMWEPIYRPLIKVKFDPEVHTNQI

SEQ ID NO: 1391 - protein, 682 aa, Kazachstania servazzii
  source 1..682: note = SBI05419_Acetyl-coenzyme A synthetase
MTLPTHKTVHEAQGVQPRLAPDHFFKSQPGPAYVNSFEEYKSMYNESINNPDKFFGKMATELLHWDKPFTHVKSGSLANGDVAWFLNGQLNAAYNCVDRHALANPNKIALIYEADEESESKTITFGELLRSVCKVAGVLKSWGVKKGDTVAIYMPMIPQTLIAMLAVARLGAVHTVIFAGFSSGSLKDRVVDAGCKVVITCEEGKRGGKTIHAKKIVDEALNAVSTVKHILVCPRTNNRSVPMKAGRDFWWDEETEKHRGYCPPTPCNAEDPLFLLYTSGSTGSPKGVVHTIGGYLLGAAMTTRYVFDVHPEDTLFTAGDVGWITGHTYALYGPLSLGTASIIFESTPAYPDYGRYWRIIERYRATHFYVAPTALRLIKRVGEAEISKYDISSLRVLGSVGEPIAPDLWEWYNEKIGNNNCAICDTYWQTESGAHLIAPLAGVTPTKPGSATLPFFGVETVIIDPVSGEEMKGNDVEGVLAVKSSWPSMTRSIWNNHSHYLNTYMNVYPNHYFTGDGAGRDHDGYYWIRGRVDDVVNVSGHRLSTAEIEATLCTNDRVSESAVIGINDELTGQAIVAFVSLKKLGEDDPIELDFEASPQELRRELVLQVRSEIGPFASPKTIITVKDLPKTRSGKIMRRVLRKCASKEADQLGDLSTLANPEIVPVIIDALDTQFFNAQQKK

SEQ ID NO: 1392 - protein, 638 aa, Kazachstania servazzii
  source 1..638: note = SBI05419_Acetyl-coenzyme A synthetase
MTLPTHKTVHEAQGVQPRLAPDHFFKSQPGPAYVNSFEEYKSMYNESINNPDKFFGKMATELLHWDKPFTHVKSGSLANGDVAWFLNGQLNAAYNCVDRHALANPNKIALIYEADEESESKTITFGELLRSVCKVAGVLKSWGVKKGDTVAIYMPMIPQTLIAMLAVARLGAVHTVIFAGFSSGSLKDRVVDAGCKVVITCEEGKRGGKTIHAKKIVDEALNAVSTVKHILVCPRTNNRSVPMKAGRDFWWDEETEKHRGYCPPTPCNAEDPLFLLYTSGSTGSPKGVVHTIGGYLLGAAMTTRYVFDVHPEDTLFTAGDVGWITGHTYALYGPLSLGTASIIFESTPAYPDYGRYWRIIERYRATHFYVAPTALRLIKRVGEAEISKYDISSLRVLGSVGEPIAPDLWEWYNEKIGNNNCAICDTYWQTESGAHLIAPLAGVTPTKPGSATLPFFGVETVIIDPVSGEEMKGNDVEGVLAVKSSWPSMTRSIWNNHSHYLNTYMNVYPNHYFTGDGAGRDHDGYYWIRGRVDDVVNVSGHRLSTAEIEATLCTNDRVSESAVIGINDELTGQAIVAFVSLKKLGEDDPIELDFEASPQELRRELVLQVRSEIGPFASPKTIITVKDLPKTSTKKMCI

SEQ ID NO: 1393 - protein, 475 aa, Kazachstania servazzii
  source 1..475: note = SBI05419_Acetyl-coenzyme A synthetase
MQTIHAKKIVDEALNAVSTVKHILVCPRTNNRSVPMKAGRDFWWDEETEKHRGYCPPTPCNAEDPLFLLYTSGSTGSPKGVVHTIGGYLLGAAMTTRYVFDVHPEDTLFTAGDVGWITGHTYALYGPLSLGTASIIFESTPAYPDYGRYWRIIERYRATHFYVAPTALRLIKRVGEAEISKYDISSLRVLGSVGEPIAPDLWEWYNEKIGNNNCAICDTYWQTESGAHLIAPLAGVTPTKPGSATLPFFGVETVIIDPVSGEEMKGNDVEGVLAVKSSWPSMTRSIWNNHSHYLNTYMNVYPNHYFTGDGAGRDHDGYYWIRGRVDDVVNVSGHRLSTAEIEATLCTNDRVSESAVIGINDELTGQAIVAFVSLKKLGEDDPIELDFEASPQELRRELVLQVRSEIGPFASPKTIITVKDLPKTRSGKIMRRVLRKCASKEADQLGDLSTLANPEIVPVIIDALDTQFFNAQQKK

SEQ ID NO: 1394 - protein, 259 aa, Kazachstania servazzii
  source 1..259: note = SBI05419_Succinate dehydrogenase iron-sulfur subunit
MSMRSILTRRTLATVAAKAAPAAPRLKTFKIYRWNPDKPAEKAKLEDYQVDLNECGPMVLDALIKIKDEQDPTLTFRRSCREGICGSCAMNIGGRNTLACLCKIDQNESKKLKIYPLPHMYIVRDLVPDLTNFYQQYKSIKPYLQRKSFPEDGKEVLQSIDDRKKLDGLYECILCACCSTSCPSYWWNQEEYLGPAVLLQAFRWLIDSRDQAGQERRQMLQNSMSLYRCHTIMNCTRTCPKGLNPGKAIAEIKKQMAFT

SEQ ID NO: 1395 - protein, 417 aa, Kazachstania servazzii
  source 1..417: note = SBI05419_Succinate--CoA ligase subunit beta
MLRNNLVQQISKRALSIHEYRSAQLLAQYGIGTPKGKVAFTPQEAGQIARDIPNREIVLKAQALTGGRGKGHFTGPTGLKSGIQMLNNDSNEVIKISEQMLGHNLVTKQSGPKGKFVSGVFVVERLNASKEAYLSIMMDRSTQMSLIIVSKEGGVNIEEVAEKNPDAVKKFYIKNSGQGVDDSLALKIAHELGFDPKLDKEGAKTIQQLFKIFKERDATQIEINPISEVSTKDGERVMCMDAKFGFDDNASFRQEEVFSWRDLSQEDPNEVEAKKYDLNFVKLQGNIGCLVNGAGLAMATMDVIKLYGGDPANFLDCGGGATPETIKKGFELILSNDKVDAIFVNIFGGIVRCDHVAMGLISAAKELNIKIPIIARLQGTNLDEGIRLIKESGVKIYSFDELDPAAKKVVELANEQA

SEQ ID NO: 1396 - protein, 165 aa, Kazachstania servazzii
  source 1..165: note = SBI05419_Succinate dehydrogenase assembly factor 2
MLSGIKTVNTISKRVGPTLTKCLWLSTTTSTASNKDSKLPTGDQISHSDLLQRIKIPPIKRTNESIDKMRSRLIYQSRKRGILETDLLLSGFASKYLKGMNLEELREYDELLNELDWDIYYWATKNYKISKIPDKWVDSKILHRLQDFAQNKNKEILKMPELDKY

SEQ ID NO: 1397 - protein, 516 aa, Kazachstania servazzii
  source 1..516: note = SBI05419_Aldehyde dehydrogenase 5
MLSRTTTSRLVTTRFLRLYTTSKFSVPITLPNGKIYQQPTGLFINGEFVQSKLGKKVDVINPSTEEVITEIYKASEEDVDFAVKSAKTAFETTWSNASPEFRGKVLFKLADLIEQHADTLASIESMDNGKSLHCSRGDVDLVSKYLRSCGGWTDKIYGKVIDTGKDYFAYSVREPLGVCGQIIPWNFPLLMWSWKIGPALATGNTVVLKPAETTPLSALFASQLCKEAGIPDGVVNILPGSGRVIGEHLCKHPDVKKIAFTGSTVTGRHIMKIASDTVKKVTLELGGKSPNIVFADADLDKAVKNIANGIFYNSGEVCCAGSRIYVQDTVYEEVLAKFKTFTDGLKVGNPFDVDTYQGAQTSKKQLDTILKFIDIGTKEGARIVTGGERLGNKGYFVKPTIFADVKEDMTIVKDEIFGPIVTVSKFSTVDEVIGLANDSQYGLAAGIHTKDLNKAFDVSSRVKAGTVWINTYNDFHQNVPFGGFGQSGIGREMGDAALDNYTQVKSVRMSIDKPVY

SEQ ID NO: 1398 - protein, 330 aa, Kazachstania servazzii
  source 1..330: note = SBI05419_Succinate--CoA ligase subunit alpha
MLRNNSVLKAQTLARRFIHRADIPYDKTIQNLLLPQDTKVIIQGFTGKQGSFHAQLSMDYGTNVVGGTNPKKAGQLHLNKPVFASVKDAMKETGANATGIFIPPPFAAAAIKEAIEAEIPLAVCITEGIPQHDMLYISEMLKSQDKTRLVGPNCPGVINPTTKVRIGIQPTKIFKAGKIGIISRSGTLTYEAVQQTTNHNLGQSLVIGMGGDAFPGTNFIDALKLFLNHEETEGIIMLGEIGGKAEIEAAQFLKEFNYTRSKPLPVASFIAGTVAGQMKGVRMGHSGAIVEGSGTDADSKKQALRDVGVAVVESPGLLGQALVDEFNKLK

SEQ ID NO: 1399 - protein, 498 aa, Kazachstania servazzii
  source 1..498: note = SBI05419_Magnesium-activated aldehyde dehydrogenase
MKYNFEIAEPVEVTLPNGVKYSQPTGLFINNQFIQSHNHKTIDVENPATQETIVAVSTGTVEDVEYAVESAERAFKDTNWATQDPKVRAKALFKLADLVEENIDLFSAVETANNGKTLALSAGDVQIGIDCLRDAASYADKINGRTMDTGDGYMNFTMKSPIGICGQIIPWNFPFMMLIWKIAPALAMGNVSILKPASATPLTALLLCSFMEKAGFPAGVVNIVPGSGREVGTAITEHPKIRKIAFTGSTDIGKDIAVRSSAANLKKATLELGGKSAHLVFNDANIEKTLPNLVNGIFKNAGQICSSGSRIYIQEGIYDELLAAFKTYVEDLKVGDPFDKSNFQGAITNKGQFDTIMKYINIGKEEGAKILTGGERVGDKGYFVRPTIFYDVKEDMKIVKEEIFGPVVTISKFSTIEDGVAMANDSEFGLGAGIETENISTGLRVARMLHSGTVWINTYNDFDSRVPFGGVKQSGYGREMGTEVYDNYTEVKAVRIKL

SEQ ID NO: 1400 - protein, 498 aa, Kazachstania servazzii
  source 1..498: note = SBI05419_Magnesium-activated aldehyde dehydrogenase
MKYNFEQSDPVEITLPNGLTYSQPTGLFINNEFIQSQSYATSTIEDPATETPIVDVASGSSEDVDYAVECAEYTFNQSKWATQDPKLRAKVIYKLADLVEQNKELIASIETYNNGKTLALSTGDVEVGIDCLRDAASYADKINGRVIESGEEYMNFTMKTPIGVCGQIIPWNFPFMMLIWKIAPAIAMGNTIILKPAPATPLTALFFASLVQQAGMPAGVVNIIPSAGVSVGTALTQHPKIRKIAFTGSTGIGKHVANSAATSNLKKTTLELGGKSAHLVFNDANVEKTLPNLVNGIFKNAGQICSSGSRIYIQEGIYDELLAAFKTYVEDLKVGNPFDKSNFQGAISTKPQFETILNYINIGKEEGAKILTGGERVGDKGYFVRPTIFYDVKEDMRIVKEEIFGPVVTISKFSTIEDGVAMANDSEFGLGAGIETENLSTALRVAKMLHAGTVWVNTYNDFDSRVPFGGVKQSGYGREMGEEVYANYTEVKAVRIKL

SEQ ID NO: 1401 - protein, 348 aa, Kazachstania servazzii
  source 1..348: note = SBI05419_Alcohol dehydrogenase
MSIPTTQKGVIFETNGGKLEYKEIPVPTPKANELLINVKYSGVCHTDLHAWKGDWPLPVKLPLVGGHEGAGVVVAMGENVKGWKIGDFAGIKWLNGSCMNCEYCELSNESNCPDADLSGYTHDGSFQQYATADAVQAAKIPAGTDLANVAPILCAGVTVYKALKSANLRAGEWVAISGACGGLGSLAIQYATAMGYRVLGIDGGDEKAKLFKELGGEHFVDFTKTKDIEGDIIKATNGGAHGVINVSVSEAAIEASTRYVRANGTVVLVGLPAGAVCKSEVFSHVVKSISIVGSYVGNRADTREALDFFVRGLVKSPIIIAPLSDLPEIFDKMEKGQIVGRYVVNCDN

SEQ ID NO: 1402 - protein, 555 aa, Kazachstania servazzii
  source 1..555: note = SBI05419_Malate synthase 1
MVKRTLKNVLLQVTVDTTPQFAPSTTTPKDILTKEALEFIVLLHRTFNSTRKSLLQNRQTIQNGLDSGSYKFHFLEETSKIRTEISWQGAIPAPGLIDRSTEITGPPLRNMLINALNSDVKTYMTDFEDSLSPTWNNIIYGQVNLYDTIRNKVNFTSSKGKAYKLKNDINKLPTLIVRPRGWHLEEKHLLVDDEPISASIFDFGLYFFHNAKRLIEIGKGPYFYLPKMEHHLEAKLWNDIFCVAQDYLGIPRGTIRATVLIETLPAAFQMEEIIFQLKEHSSGLNCGRWDYIFSTIKRLRNLPEHLLPDRDQVTMTSPFMDAYVKLLINTCHRRGVHAMGGMAAHIPIKDDLKANEVAMTKVRTDKIRELTNGHDGSWIAHPALAKICNEVFINMGTPNQIYKIPDFSQFKSSELTNTTIPDAKITSDGIRQNLDIGLQYMEAWIRGSGCVPINNLMEDAATAEVSRCQLYQWVKHGVTLSDTGDKILNEQIAKLKASSPLGAKNKFDLAGKYFLPEITGQHFSEFLTSLLYDEIVTINSTNNEYISSLNEWSKL

SEQ ID NO: 1403 - protein, 640 aa, Kazachstania servazzii
  source 1..640: note = SBI05419_Probable succinate dehydrogenase flavoprotein
MLSLRTRGSILSRSSNAVRAFSTARTTRLAHQTNAADSSSMPNSDYHIIDHEYDCVVVGAGGAGLRAAFGLAEAGFKTACISKLFPTRSHTVAAQGGINAALGNMHPDDWKWHMYDTVKGSDWLGDQDSIHYMTKEAPKAIIELEHFGMPFSRNEEGRIYQRAFGGQSKEFGKGGQAYRTCAVADRTGHAMLHTLYGQALNHDCNFFIEFFVMDLLTHNGEVVGVIAYNQEDGTIHRFRSHKTIIATGGYGRAYFSCTSAHTCTGDGNAMVSRAGFPLQDLEFIQFHPSGIYGSGCLITEGARGEGGFLLNSEGERFMERYAPTAKDLASRDVVSRAMTMEIRAGRGVGKDKDHLLLQLSHLPPSVLKERLPGISETASIFAGVDVTKEPIPILPTVHYNMGGIPTKWTGEALTVDPETGEDQPIPGLFACGEAACVSVHGANRLGANSLLDLVVFGRAVAHTISDTLQPGLPHKQVPMDIGKESIANLDKIRNANGSRPTSEIRLKMKRTMQADVSVFRTQETLDEGVSNITAVADSFKDIGTTDRSMIWNSDLVETLELQNLLTCAKQTAVSAAARKESRGAHAREDYPTRDDENWMKHTLSWNQNISDPVTLKYRKVIYKTLDEKECPSVPPAIRSY

SEQ ID NO: 1404 - protein, 425 aa, Kazachstania servazzii
  source 1..425: note = SBI05419_Isocitrate dehydrogenase
MSTLISKVKVKNPIVEMDGDEQARVMWHLIKQKLILPYMDINLKYFDLSIQNRDLTEDKITTDSALATLKYQVAIKCATITPDEARMKEFHLKKMWKSPNGTIRNILGGTVFREPIVIPKIPRLIKHWEYPIIIGRHAFGDQYKAVDLKIPHEGALKICYEDESNNNESVEKKVFTYPNRGGVAMIMYNTTDSIEDFAKASFELALKRKLPLFFATKNTILKKYDGYFKDIFQKIFEKQYEEKFKSLGLTYEHRLIDDMVAQMLKSRGGFILALKNYDGDVQSDIVAQGFGSLGLMTSVLLTPDGKIFESEAAHGTVTRHYRKHQRGEETSTNSIASIFAWSRGIIQRGTLDNSPDVVKFGQWLERSTIDTVQIDNIMTKDLALLLGKTDRKSYVTTEEFIEAVKKRLNKELQKFSTLQHTKAKL

SEQ ID NO: 1405 - protein, 565 aa, Kazachstania servazzii
  source 1..565: note = SBI05419_Pyruvate decarboxylase isozyme
MSTITLGRYLFERLNQVNVNTVFGLPGDFNLVLLDKLYEVPGMRWAGSTNELNASYSADGYARIKGMSCLITTFGVGELSALNGIAGSFAEHVGVLHVVGTPSTVSQSKNLLLHHTLGNGDFDVFHRMSAEISDSTEMITDLAEACDQIDRCIRNTYIKQRTIYLGIPANFFDFEVPTSRLETPIDLSLPKNNADAEAEAIETILSLVKGAKNPIIISDACASRHDVKDETKQLIDITQFPAFTTPMGKGSINEAHPRFGGVYVGTLSSPAVKKAVESADLILSVGALLSDFNTGSFSYSYQTKNIVEFHSDYIKVKQANFTGVQMKPLLNKLLPLMPAVVKDYKPSPVPSRPVLAGSEVTDPKANLKQNWLWSHLSDFLQEGDIVITETGTSAFGINQTTFPNNTVGISQVLWGSIGFTGGAVVGASFAAEELDPNRRVMLFIGDGSLQLTVQEISTMIRWNLKPYLFVLNNKGYTIEKLIHGPTAQYNEIQPWNHLDLLPTFGAKEYETHRVGTIGEWNALTQDKKFQKNSMIRMIEIMLPVMDAPDSLIAQGKLTAQINATQ

SEQ ID NO: 1406 - protein, 424 aa, Kazachstania servazzii
  source 1..424: note = SBI05419_Isocitrate dehydrogenase
MMFVSRRCLSSTSQLAKIKVKSPIVELDGDEMTRIIWSQIKSKLILPFLDVDLKYYDLSITSRDQTKDQITKDAANAIKDYGVGIKCATITPDEGRVKEFNLTKMWKSPNGTIRNILGGTVFREPIVIPRIPRLVPGWEKPIIIGRHAHGDQYKATDLIVPEAGKLELVYTNDRTGAKETLNVFDYKGAGVGLAMYNTDESIVGFAHSSFKLALTKKLNLFLSTKNTILKKYDGRFKDIFQEIYESTYKKQFETLGINYEHRLIDDMVAQMVKSKGGFIMALKNYDGDVQSDIVAQGFGSLGLMTSVLVTPDGKTFESEAAHGTVTRHYRKFQKGEETSTNSIASIFAWTRGIAKRGELDNTPEVVRFANILESATLNTVQEDGIMTKDLAATLGKSDRSSYVNTEEFLNAVEKRLQLEVKSIE

SEQ ID NO: 1407 - protein, 724 aa, Kazachstania servazzii
  source 1..724: note = SBI05419_Acetyl-coenzyme A synthetase
MTPTAVSEKPSIVDTTIKTIKQKLSSANNSANNSANNSANNSNSSNNAQKKEYQYEHLTNVEIIDQKPLGDRIQNIKNYKPNIGPNGDWNDYKVAYNESINNPSQYYADLAKENLHWFKPFDQTFIPDPITKTPSFENNAWFINGQLNACYNCVDKHALATPDKIAILYEPDDPNDEAIKLTYKQLLEQVSKLAQVLKISMGVNKGDTVAVYMPMIPQAIITLLAIVRIGAIHSVIFAGFSSHSLKDRIIDAHCKCVITADESLRGGKIIQTKKIVDDAIKDIDFVSNVLVYKRTGNDSVPYHPNRDLIWSDEMPKYKTYYPCEPVDSEHPLFLLYTSGSTGTPKGVQHSTAGYLINALLSMKYTFDVHPEDIFFTAGDIGWITGHTYVVYGPLLTGCTTVVFEGTPTFPNCSRYWDIIDKHQITQFYVAPTALRLLKRAGNQFIEGFSLKSLRCLGSVGEPIAAEVWDWYSEQIGKNEIPIVDTYWQTESGAHLITPLAAGVTPMKPGSASFPFIGIEPVILDPTTGEEINDEHAEGAWPSFARTIWKNHDRFLDTYLNPYPGYYFTGDGAARDKDGYIWILGRVDDVVNVSGHRLSTAEIESALIEDSLVAETAVVGFNDDLTGQAVAAFVVLKSKSTWSNASEEELQETKKHLILTVRTDIGPFAAPKLIVLVDDLPKTRSGKIMRRILRKILAGEADQLGDITTLSNPDVVQHLIDSVKL

SEQ ID NO: 1408 - protein, 517 aa, Kazachstania servazzii
  source 1..517: note = SBI05419_Aldehyde dehydrogenase 5
MFSASVQTVKSQRYTLYRQLRLFSQLPLSVPIKLPNGLEYEQPTGLFINNKFVPSVQHKTFEVINPSTEDEICHVYEGREDDIEIAVEAASKAFENGSWSKIDPQERGHALYKLAEFIEKDKEVIASIESLDNGKAINSARGDVQLVVNYLKSASGLADKIDGRTIDTGSTHFSYTKRQPLGVCGQIIPWNFPLLMWAWKIGPALATGNTVVLKTAESTPLSALYVSKYIGKAGIPPGVINIVSGFGKITGEALTTHPKVKKIAFTGSTATGKHIYQNAAKSLKKCTLELGGKSPNVVFADADMAKAVQNVILGIFYNSGEVCCAGSRVYVEESAYDEFISELKSALESLKVGNPFDELTYQGAQTSQMQLDKILKYIDIGKKEGATIITGGERLGDKGYFVKPTVFGNVTENMKIVKEEIFGPVVTVSKFKTVEEVIKMANDSEYGLAAGIHTSNINKAIKLSENINAGTVWVNTYNDFHHMVPFGGFNASGLGREMGIESFDNYTQVKAVRIKVD

SEQ ID NO: 1409 - protein, 564 aa, Kazachstania servazzii
  source 1..564: note = SBI05419_Pyruvate decarboxylase isozyme
MSSITLGRYLFERLNQVDVKTIFGLPGDFNLSLLDKIYEVPGMRWAGNANELNAAYAADGYARIKGMSCIITTFGVGELSALNGIAGSYAEHVGVLHVVGVPSISSQAKQLLLHHTLGNGDFTVFHRMSANISETTAMITDIATAPAEIDRCIRTTYITQRPVYLGLPANVVDLPVPASLLETPIDLALKANDAEAETEVIETILELVRSAKNPIILSDACASRHDVKAETNQLIDTTNFPAFTTPMGKGSINESHPRYGGVYVGTLSSPAVKESVESADLILSVGALLSDFNTGSFSYSYKTKNIVEFHSDYIKIKNATFPGVQMKFVLQKLLKVIGEATKGYKQVAVPAAPAANPACDPSTPLKQEWLWRQLSNFLQEGDIVLTETGTSAFGINQSIFPNNTVGISQVLWGSIGFTGGAVLGAAFAAEEIDPKKRVILFIGDGSLQLTVQEISTLIRWNLKPYLFVLNNDGYTIERLIHGEKAGYNDIQSWKHLSILETFGAKDYENHRVATTGEWDALTSDKAFNENSRIRMIEVMLPVMDAPSSLVAQAKLTASINAKQD

SEQ ID NO: 1410 - protein, 422 aa, Kazachstania servazzii
  source 1..422: note = SBI05419_Isocitrate dehydrogenase
MSVNKIKVKTPIVEMDGDEQTRIIWHLIKEKLIRPFLDVDLKYYDLSIEYRDETQDNVTTDSAVATLKYGVAVKCATITPDEARVKEFNLHEMWKSPNGTIRNILGGTVFREPIIIPCIPRLIPQWEKPIIIGRHAFGDQYKATDTVIKTAGTLKLVFEPDNVPKDAANDKNNGKIVMNVFHYPEDGGVAMVMYNTKESIQGFAKASFELAVERKLPLYSTTKNTILKKYDGMFKDIFESMYEEEFRAKFEELGIWYEHRLIDDMVAQMLKSNGGYIIAMKNYDGDVQSDIVAQGFGSLGLMTSVLMSADGKTFESEAAHGTVTRHYRQHQQGKETSTNSIASIFAWTRGIIQRGKLDNTPDVVKFGEILERATIDTVQEDGIMTKDLALILGKKDRESYVTTEEFIDGVEKRLINDFGKAF

SEQ ID NO: 1411 - protein, 376 aa, Kazachstania servazzii
  source 1..376: note = SBI05419_Alcohol dehydrogenase
MLKLITQHQTVARSGFKQFSRLQSTFTIPSTQKGVIFYEHGGQLHYKDIPVPKPKPNEILINVKYSGVCHTDLHAWKGDWPLPVKLPLVGGHEGAGVVVAKGENVTNFKIGDLAGIKWLNGSCMSCELCESGHESNCEHADLSGYTHDGSFQQYATADAVQAAKIQPGTNLAEVAPVLCAGITVYKAIKEANLRPGQWICISGAAGGLGSLAVQYAKCMGLRVLGIDGGPGKKELFESLGGECFIDFTKHKDPKDMVRAIQDATKGGPHGVINVSVSEAAISLSTEYVRACGTVVLVGLPAHSIVKSDVFSHVVKSINIKGSYVGNRADTREALDFFSRGLIKSPIKIVGLSELPKVYELMEAGKILGRYVVDTAK

SEQ ID NO: 1412 - protein, 501 aa, Kluyveromyces marxianus
  source 1..501: note = SBI05449_Aldehyde dehydrogenase [NAD(P)+]
MSLFQSIKIPQVGIEYQQPLGLFINNEFVKSSDGKVIETVNPATEEPITSFYAASQEDVDLAVNAARNAFDNVWSKTSPEERGALLLKLFDLIERDKHLLAAIETLDSGKPYHSNSLGDLEQILQLTRFFAGAADKFNAGSYLPVNHDKYAYTMKVPFGVVAQIVPWNYPLAMASWKIQSCLAAGNTIVIKPAENTSLSLLYFAQLVKEAGFPPGVLNILPGYGAIAGSALASHMGVDKIAFTGSTAVGQKVMALAAQSNLKDVTLECGGKSPCVIFADANIDEAIQWVAGGILYNSGQNCTANSRIYVQKEVYNEFLEKFSKHVAETWKFGSKSDPFDEDCTIGPVISKVQYDRIQSYINHGKEKEGLTIKQFADYPSKGYFIPPTFFTEVPITSKLSQEEIFGPVGVIAPFSDYDEAIKLANDSSYGLASCVFSENARTTAQFARDIKSGTVWINSSNDEEISVPFGGFKMSGIGRELGPSGVEEYLQTKAVHVNISKL

SEQ ID NO: 1413 - protein, 348 aa, Kluyveromyces marxianus
  source 1..348: note = SBI05449_Alcohol dehydrogenase
MAIPETQKGVIFYENGGELQYKDIPVPKPKPNELLINVKYSGVCHTDLHAWQGDWPLDTKLPLVGGHEGAGIVVAMGENVTGWEIGDYAGIKWLNGSCMSCEECELSNEPNCPKADLSGYTHDGSFQQYATADAVQAARIPKNVDLAEVAPILCAGVTVYKALKSAHIKAGDWVAISGACGGLGSLAIQYAKAMGYRVLGIDAGDEKAKLFKELGGEYFIDFTKTKDMVAEVIEATNGGAHAVINVSVSEAAISTSVLYTRSNGTVVLVGLPRDAQCKSDVFNQVVKSISIVGSYVGNRADTREALDFFSRGLVKAPIKILGLSELATVYDKMSKGQIIGRIVVDTSK

SEQ ID NO: 1414 - protein, 348 aa, Kluyveromyces marxianus
  source 1..348: note = SBI05449_Alcohol dehydrogenase
MSIPTTQKGVIFYENGGQLYYKDIPVPKPKSNELLINVKYSGVCHTDLHAWKGDWPLDTKLPLVGGHEGAGVVVAMGDNVKGWKIGDLAGIKWLNGSCMNCEECELSNESNCPDADLSGYTHDGSFQQYATADAVQAAHIPAGTDLAQVAPILCAGVTVYKALKTAEMKAGDWVAISGAAGGLGSLAVQYAKAMGFRVLGIDGGEGKEELFKSLGGEVFIDFTKSKDIVGEVIKATNGGAHGVINVSVSEKAIESSIEYCRSNGTVVLVGLPKDAKCKSDVFNQVVKSIHIVGSYVGNRADTREALDFFCRGLVHAPIKVVGLSTLPEIYEKMEQGKILGRYVVDTSK

SEQ ID NO: 1415 - protein, 514 aa, Kluyveromyces marxianus
  source 1..514: note = SBI05449_Aldehyde dehydrogenase 5
MLARTQINTVRRFIRLYSQLPLKVSVQLPNGTTYEQPTGLFINGEFVPSRQHKTFEVLNPSTEEEITHIYEAREDDVDIAVAAAKKAFDNGWSTAEPEERAKCLLKLADLVDEHAETLAAIESLDNGKSLFCSRGDVALVAKYLRSCAGWADKIYGKVIDTGADHFSYSKREPLGVCGQIIPWNFPLLMWSWKIGPALATGNTTVLKPAEATPLSALYACQLVQQAGVPKGVVNIIPGFGKIVGERICTHPDIKKVAFTGSTATGRHIMKTCADSVKKVTLELGGKSPNIVFADADLDKAIKNIAFGIFYNSGEVCCAGSRIYVQDTVYEEVLEKFKQYAESLKVGNPFEEGVFQGAQTSQMQIDKILSYVDIGLSEGARVVTGGERIGNKGYFVKPTIFADVAEDMQIVKDEIFGPVVTVSKFTTVDEVVAKANDSQYGLAAGIHTKDVNKAIDVSNRIKAGTIWINTYNNFHQNVPFGGFGQSGIGREMGAEALDNYTQTKAVRMAIDHPNY

SEQ ID NO: 1416 - protein, 429 aa, Kluyveromyces marxianus
  source 1..429: note = SBI05449_Isocitrate dehydrogenase
MKTTVINVHRQFSSSAMAGLRKIKVQTPIVELDGDEMTRIIWDKIKQKLILPYLDVDLKYYDLSVTNRDATDDKVTVDSANAIKKYGVGVKCATITPDEARVKEFNLKKMWKSPNGTIRNILGGTVFREPIVIPRIPRLVPGWEKPIVIGRHAHGDQYKATDLIVPGPGKLELVYKPGDGSETKTLEVYDYKGPGVALAMYNTDESIRGFAHSSFKLAIAKKLNLYLSTKNTILKQYDGRFKDIFQEVYDSDYKAEFEKLNIWYEHRLIDDMVAQMIKSKGGFILAFKNYDGDVQSDIVAQGFGSLGLMTSVLVTPDGKTFESEAAHGTVTRHYRQYQQGKETSTNSIASIFAWTRGLAKRGELDNTPEVVKFANLLESSTLNTVQEDGIMTKDLALACGKSDRSSYVTTDEFLDAVEARFKNDIKSLQ

SEQ ID NO: 1417 - protein, 424 aa, Kluyveromyces marxianus
  source 1..424: note = SBI05449_Succinate--CoA ligase subunit beta
MLAQSYKLRSCLQRSSAIVRQQVRNLSIHEYRSAELLRQYGVGTPSGAAAHTVEEATKIAEQLGGKNLVVKAQALTGGRGKGHFDNGMQSGIHMIDSVQEAADVSSKMLGYNLITKQSGAKGKLVSGVYIVEKVDAKHESYLSILMDRKTKKPLIICSSEGGMNIEDVAKTNPDAIKKFYVQDSVGLTEETAAEIAASLGFSKEAEADAKDAVLKLYKIFKEKDATQIEINPLSEVVGQDKKVMCMDAKFGFDDNASFRQQEVYSWRDLTQEDPDEVIAKKSDLNFVKLKGNIGCLVNGAGLAMATMDVIKLYGGDPANFLDCGGGATPETIETAFKLILSNENVDAIFVNIFGGIVRCDFVAQGLVAATKNLSVKVPIVARLQGTNLTEGRRIIAESGLKIYSFDELDPAAQKVVELTNAAAQ

SEQ ID NO: 1418 - protein, 507 aa, Kluyveromyces marxianus
  source 1..507: note = SBI05449_Magnesium-activated aldehyde dehydrogenase
MSSSLAEKLNVKIVEQKPVTVTLPNGLTYEQPTGLFINNQFIRSQDGSTLKVENPSTEEIIVEVQSATAQDVEYAVESAEAAFNSEWSSMDPRNRAAYLVKLANLIEEKKELIASIESTDNGKALALARGDVGLVIDYIRSAAGYADKLGGRTIDTGDGYANFTYREPIGVCGQIIPWNFPLMMLSWKIAPALVAGNTVILKPASPTPLNALFFASLCKEAGIPAGVVNIVPGPGRSVGDTITNHPKIRKIAFTGSTDIGRDVAIKAAQSNLKKVTLELGGKSAHLVFADANIKKTIPNLVNGIFKNAGQICSSGSRIYVQDTIYDELLSEFKKYLETEIKVGSPFDESNFQAAITNKAQFETILNYIDIGKKEGAKILTGGERVGNKGYFIRPTVFYDVKEDMRIVKEEIFGPVVTISKFSTVDEAVALANDSEFGLGAGIETENLSVALKVAKRLHAGTVWINTYNDFDAAVPFGGYKQSGYGREMGEEAFESYTQVKAVRIKLE

SEQ ID NO: 1419 - protein, 474 aa, Kluyveromyces marxianus
  source 1..474: note = SBI05449_Citrate synthase 3
MLRTISQTRLFSTSRRLLSLKAALSEVIPEKREEFLRIKKDYSNVKVGDITVGSIINGMRGNQSMYWESTTLDPAEGIRFHGKTIAECQECLPGAPEDNGKGEFLPESMLWLLMTGKPPTPEQAQELTKELAVRGENIPHHTDKLLSSLPHDMHPMTQLAIALASMNQNSLFAQEYQKGTIGKSDYWYYVYEDVLNLIAALPKLTGKIYSNVTNGGEPLGCYNVNKDWSYNIASLLGMTVSDSVNTHSLTSERSNDFVNLVRLYCGIHVDHEGGNVSAHTTHLVGSALSDPYLSYSSGIMGLAGPLHGLAAQEVVRFLAEMEKSVGSGENVKQVQDYLWSVLNSHRVIPGYGHAVLRKPDPRFDAMLNFAQSRPKEFENDSKVQLMKRLSEIAPGVLKEHGKTKNPYPNVDSASGILFHHYGIDQMLFFTVIFGCSRSMGPLTQLVWDRILGLPIERPKSLDLNSIKKICNISS

SEQ ID NO: 1420 - protein, 145 aa, Kluyveromyces marxianus
  source 1..145: note = SBI05449_Succinate dehydrogenase assembly factor 2
MIAPGILLQGARAVPVAVPRAMPRLTKTTSPSESESPPIERTGESLDRKRARLIYQSRKRGILETDLLLSRFAAKYLKTMSPEELQEYDELLNELDWDIYYWATENYSITPLPDKWKDSKMLKRLQEFSKNKDREILSMPDLSKY

SEQ ID NO: 1421 - protein, 351 aa, Kluyveromyces marxianus
  source 1..351: note = SBI05449_Alcohol dehydrogenase
MASVAIPEKQKGVIFYENGGKLEYKDIPVPKPKPNEILINVKYSGVCHTDLHAWKGDWPLATKLPLVGGHEGAGVVVALGENVKGWEIGDYAGIKWLNGSCMSCEFCELSNESNCPDADLSGYTHDGSFQQYATADAVQAARIPKGTDLAEIAPILCAGVTVYKALKTAGLKAGDWVAISGAAGGLGSLAVQYAKAMGYRVVGIDGGEEKGKLAKQLGAEAFVDFTKTKDMIGEIQEITNGGPHGVVNVSVSEAAMNASTQYVRPTGTVVLVGLPAGAVIKSEVFSHVVKSIAIKGSYVGNRADTREAIEFFAAGKVKSPIKVVGLSELPKVYELMEQGKILGRYVVDTEK

SEQ ID NO: 1422 - protein, 642 aa, Kluyveromyces marxianus
  source 1..642: note = SBI05449_NAD-dependent malic enzyme
MLKLPKKLVVTKYYSSVTNKNLSSVTRDNTFMSTPQCDDTHYHKIPIGKDAARLQKQKKITRLSVDGPIECPMEGFQLLNSPLFNKGSAFTLEERKAFGLEGLLPPQVNTLDEQVERAYKQLCYLKTPLAQNDFMTSMRVQNKVLFFELVRRHIRQLVPIIYTPTEGDAIAAYSHRFRKPEGVFLDITEPDSIDDRLAAYGEDKDVDYIVVSDGEGILGIGDQGIGGVRIAISKLALMTLCGGVHPGRVMPVALDVGTNNKELARDELYMGNRFSRIRGKQYDEFVDKFIKALKKRFPSAVLHFEDFGVTTARPLLERYRNELACFNDDIQGTGAVVMASFIAALKHTNRDLLESKVLVYGAGSAGLGIADQIVNHMVTHGLTPEEARSKIYLMDRKGLILDNMQNDSNPAQFLFAKPSSEWSDVNTESLVDVVSRVEPTCLIGCSTQAGAFNKAVVETMYKHNNRPIIFPLSNPTRLHEAVPEDLLKWTNYDALVATGSPFPPVNGYRISENNNCFSFPGIGLGAVLSRAKVISDKMISAAVDQLADLSPLKPGDSKPGLLPPLEEINDTSAKVATAVILQALEEGSARIEDETIPGSDEKVKVPRDFDSCLEWVRKQMWKPEYRPLVKVEHDPEVHTHQI

SEQ ID NO: 1423 - protein, 555 aa, Kluyveromyces marxianus
  source 1..555: note = SBI05449_Malate synthase 1
MVKKTLENVEVLVDVDFTPQFTPSTTTVADILTKDALEFVVLLHRTFNKTRLQLLENRQIVQKKIDAGEYEFGFLKETESIRNDPTWQGPVLAPGLIDRSTEITGPPLRNMLVNALNSDVKTYMTDFEDSASPTWENVIYGQVNLYDAIRDQIDFVTPRKEYKLRAKIGELPTLIVRPRGWHMVDNHILVDGEPISASILDFGLYFFHNAHKLIEIGKGPYFYLPKMEHHLEAKLWNDIFQVAQDYVALPRGTIRATVLIETLPAAFQMEEIIWQLRQHSAGLNCGRWDYIFSTIKRLRNKPEHVLPNRDQVTMTSPFMDAYVKKLIRTCHSRGVHAMGGMAAQIPIKNDEAANTAAMTKVRNDKIRELTNGHDGSWVAHPALAPICNEVFAEMGTPNQIYKVPETTVAAADLLNTNIKDGEITTAGIKQNLDIGLQYMEAWLRGSGCVPINNLMEDAATAEVSRCQLHQWVKHKIVLKDTGKPITPELAKEILYDQAKELAAKSPLGDKNKFNLAAKYFEPEITGEKFSEFLTTLLYEEIVTVNSSPFDLSKLK

SEQ ID NO: 1424 - protein, 564 aa, Kluyveromyces marxianus
  source 1..564: note = SBI05449_Pyruvate decarboxylase isozyme
MSEITLGRYLFERLKQVEVQTIFGLPGDFNLSLLDKIYEVPGMRWAGNANELNAAYAADGYARLKGMACVITTFGVGELSALNGIAGSYAEHVGVLHVVGVPSISSQAKQLLLHHTLGNGDFTVFHRMSSNISETTAMITDINSAPSEIDRCIRTTYISQRPVYLGLPANLVDLKVPASLLETPIDLSLKPNDPEAENEVLETVLELIKDAKNPVILADACCSRHNVKAETKKLIDITQFPAFVTPMGKGSIDEQHPRFGGVYVGTLSSPEVKEAVESADLVLSVGALLSDFNTGSFSYSYKTKNIVEFHSDYIKVRNATFPGVQMKFVLQKLLTKVKDAAKGYKPVPVPHAPRDNKPVADSTPLKQEWVWTQVGKFLQEGDVVLTETGTSAFGINQTHFPNDTYGISQVLWGSIGFTGGATLGAAFAAEEIDPKKRVILFIGDGSLQLTVQEISTMIRWGLKPYLFVLNNDGYTIERLIHGETAQYNCIQSWKHLDLLPTFGAKDYEAVRVATTGEWNKLTTDKKFQENSKIRLIEVMLPVMDAPSNLVKQAQLTASINAKQE

SEQ ID NO: 1425 - protein, 254 aa, Kluyveromyces marxianus
  source 1..254: note = SBI05449_Succinate dehydrogenase iron-sulfur subunit
MFNVIFKRGLATEVKAAAPRLKTFKIYRWSPDTPAEKPRLQEYKVDLNQCGPMVLDALIKIKNEQDPTLTFRRSCREGICGSCAMNIGGRNTLACLCRIDQNENKQTKIYPLPHMYIVRDLVPDLTHFYKQYKSIQPYLQREKVPEDGKENLQSIADRKKLDGLYECILCACCSTSCPSYWWNQEQYLGPAVLMQAYRWLIDSRDEASGIRKQMLQNSMSLYRCHTIMNCTRTCPKGLNPGRAIAEIKKALAMD

SEQ ID NO: 1426 - protein, 707 aa, Kluyveromyces marxianus
  source 1..707: note = SBI05449_Acetyl-coenzyme A synthetase
MSPAVNTATPQDPIITMKNASATDASSKEKKTFEYEHLTSVPVVHPIPITERLSAEAARNYKPNLPGGFEEYKALHKESLENPAKFYHERAQLLNWFKPYDQVFIPDSEGKPTFENNAWFTNGQLNACYNLVDRHAFSQPDKVAILYEADEPGQGYSLTYSELLEQVCKVAQVLQYSMNVRKGDTVAVYMPMIPEALITLLAITRIGAVHSVVFAGFSSNSLRDRINDAYSKTVITTDESKRGGKTIETKRIVDEAVKETPQVTNVLVYKRTHNKHIRYVPGRDLDWDEELKKYKSYYPCEPVDSEHPLFLLYTSGSTGAPKGVQHSTAGYLLQALLSMKYTFDVQKDDVFFTAGDIGWITGHTYCVYGPLLSGCTTLVFEGTPAYPSFSRYWEVIDKYQVTQFYVAPTALRLLKRAGDSYTEGFSLKSLRCLGSVGEPIAAEVWEWYSEKIGKNELPIVDTYWQTESGSHLVTPLAGGATPMKPGSAAFPFFGIDLAVLDPTTGEEQTGQHAEGVLAIKRPWPSFARTIWKNNDRFLDTYLKPYPGYYFTGDGVAKDKDGFFWILGRVDDVVNVSGHRLSTAEIEAAIIEDDMVAECAVVGFSDELTGQAVAAFVVLKNKSSLTAASDSELQDIKKHLILTVRKDIGPFAAPKLIVLVDDLPKTRSGKIMRRILRKILAGESDQLGDVSTLSNPGIVKHLIDSVKL

SEQ ID NO: 1427 - protein, 181 aa, Kluyveromyces marxianus
  source 1..181: note = SBI05449_Sdh3/Shh3
MFNSVLKPGIISGVRPSVLNVNTRLMMTNFVRGQSNIVAKKTTTAEEYELLVAQRKARPVSPHLTIYQPQLTWYLSSVHRVSGVLLGFAFYAITIGFGVSSLFGLGLNTENLVQFYNEKIPSWLDITAKVGCAYLFAFHFGNGIRHLVWDAGKELTLKGVYRTGYSVLALTAVLGSYLLTL

SEQ ID NO: 1428 - protein, 415 aa, Kluyveromyces marxianus
  source 1..415: note = SBI05449_Isocitrate dehydrogenase
MAKISVKTPIVEMDGDEQTRIIWKLIKDHLIYPYLDVDLKYYDLSIENRDLTDDSVTVQSAEATLKYGVAVKCATITPDEARVKEFNLKKMWKSPNGTIRNILGGTVFREPIVIPRIPKLVTNWEKPIIIGRHAFGDQYKATDVVVPGAGKLKLVFESDDKSVENIDLDVFHFDEQSKGGVAMAMYNTTESITGFAHSSFKMALERNLPLYSTTKNTILKKYDGKFKDIFEGLYETEYKTQFEEKGIWYEHRLIDDMVAQMLKSKGGYIIAMKNYDGDVQSDIVAQGFGSLGLMTSVLITPDGKAFESEAAHGTVTRHYRQHQQGKETSTNSIASIFAWTRGLIQRGKLDNTPDVVKFAQLVEDATVNTVQEDEIMTKDLALILGKTERSAYVTTEEFIEAVHKRLDSHFKTAFN

SEQ ID NO: 1429 - protein, 290 aa, Kluyveromyces marxianus
  source 1..290: note = SBI05449_Alcohol dehydrogenase
MSSTVGFYMPPVSYFGEGALDEVAEYIKNQDYKRPVIITDPGISKIGLAQRVTKLLEKRDRVVGIYDQTQPNPTTSNVNAGLMVLKEHKGDIIISIGGGSAHDNAKAIALLATNGGEIGDYEGVNKSKKKALPMVAINTTAGTASEMTKFTIITNEEEKVKMAIIDNHITPSIAVNDPSTIYGLPPPLTAATGLDALTHCIESYVSTAANPITDTCALKGVELIHEHLFNAFKNGQDSTARTGMCYAQYLAGMAFNNASLGYVHAIAHQLGGFYHLPHGVCNAVLLPHIH

SEQ ID NO: 1430 - protein, 684 aa, Kluyveromyces marxianus
  source 1..684: note = SBI05449_Acetyl-coenzyme A synthetase
MVLGKAHKIVHEAHEVLARHAPEHFYKSQPGKSYCADEEQYRQMYSQSINDPSGFFGPLAKEYLHWDRPFTQVQSGSLEHGDVAWFLNGELNASYNCVDRHAFANPDKPALIYEADDESENKVITFGELLRQVSEVAGVLKSWGVKKGDTVAVYLPMIPAAVVAMLAVARLGAIHSVIFAGFSAGSLKERVVDAGCKVVITCDEGKRGGKTVHTKKIVDEGLAGVDSVAKILVFQRTGTVGIPMKPGRDFWWHEECVKQKGYLPPVPVNSEDPLFLLYTSGSTGSPKGVVHSTAGYLLGSALTTRYVFDIHPEDVLFTAGDVGWITGHTYALYGPLTLGTATIIFESTPAYPDYGRYWRIIERHRATHFYVAPTALRLIKRVGEQEIAKYDTSSLRVLGSVGEPISPDLWEWYHEKVGNKNCVICDTMWQTESGSHLIAPLAGAVPTKPGSATVPFFGINACIIDPVSGEELTGNDVEGVLAVKSPWPSMARSVWNNHSRYFETYLKPYPGYYFTGDGAGRDHDGYYWIRGRVDDVVNVSGHRLSTAEIEAALVEHEGVSESAVVGITDELTGQAVIAFVSLKDGYLAEDAVEGDPAHISPDKLRRELILQVRGEIGPFAAPKTVVIVNDLPKTRSGKIMRRVLRKIASKEADQLGDLSTLANPDVVPSIISSVETQFFNQQKK

SEQ ID NO: 1431 - protein, 521 aa, Kluyveromyces marxianus
  source 1..521: note = SBI05449_Aldehyde dehydrogenase 5
MLRSTAAGSTRAFRSQTAAFSYALRLYSHLPLKVKVDLPNGISYEQPTGLFINNQFVPSKQGKTFEVLSPSTEEEITHVYEGREEDVDAAVEAADKAFKSGVWSRVDPLVRAQCLNKLADYIEKDAETIASIESLDNGKAISSAKGDVALVVNYLRSAAGYADKIDGRLIDTGSTHFSYTRREPLGVCGQIIPWNFPLLMWAWKIAPALATGNTVVLKTAESTPLSALYVSQYIPKAGIPDGVVNIVSGFGKIVGEAITTHPKIKKVAFTGSTATGRHIYQNAGVNLKKVTLELGGKSPNIVFADANIKQAVQNALLGIYYNSGEVCCAGSRLYVEESVYDEFLSEIKAASEALKVGDPFDAETFQGAQTSQTQLDKIMKYVEIGKKEGATLITGGERIGDKGYFVRPTVFADVEENMRIVKEEIFGPVVTITKFKTIDELVEKANDSEYGLAAGIHTTNINTAIQVSNRLNAGTVWINTYNDFHHSVPFGGFNASGIGREMGAEALDNYTQVKAVRVKLE

SEQ ID NO: 1432 - protein, 379 aa, Kluyveromyces marxianus
  source 1..379: note = SBI05449_Alcohol dehydrogenase
MFRLARAQTSITTTSKALGGSRRLFVRLNSSFAIPESQKGVIFYENGGKLEYKDLPVPKPKPNEILINVKYSGVCHTDLHAWKGDWPLPVKLPLVGGHEGAGVVVAKGENVTNFEIGDYAGIKWLNGSCMSCELCEQGYESNCLQADLSGYTHDGSFQQYATADAVQAAQIPKGTDLAEIAPILCAGVTVYKALKTADLQPGQWIAISGAAGGLGSLAVQYAKAMGLRVLGIDGGPGKEELFKSLGGEVFIDFTKSKDMVADIQEATNGGPHGVINVSVSEAAISMSTEYVRPTGVVVLVGLPAHAYVKSEVFSHVVKSISIKGSYVGNRADTREAIDFFTRGLVKSPIKVVGLSELPKVYELMEAGKILGRYVVDTSK

SEQ ID NO: 1433 - protein, 635 aa, Kluyveromyces marxianus
  source 1..635: note = SBI05449_Probable succinate dehydrogenase flavoprotein
MQLCRRNAARTFSNSVVLRHAYAAKDDVDGQQQESAQSGQYNIVDHEYDCVVVGAGGAGLRAAFGLAEAGYKTACISKLFPTRSHTVAAQGGINAALGNMHKDDWKWHMYDTVKGSDWLGDQDSIHYMTREAPKSIIELEHFGVPFSRTEEGRIYQRAFGGQSKEYGKGGQAYRTCAVADRTGHALLHTLYGQALRHNTHFFIEFFAMDLLTHNGEVVGVMAYNQEDGTIHRFRAHKTIIATGGYGRAYFSCTSAHTCTGDGYAMVSRAGFPLQDLEFIQFHPSGIYGSGCLITEGARGEGGFLVNSEGERFMERYAPTAKDLACRDVVSRAITMEIREGRGVGKEKDHMFLQLNHLPPSVLHERLPGISETAAIFAGVDVTKEPIPILPTVHYNMGGIPTKWNGEALTIDEETGEDKPIPGLLACGEAACVSVHGANRLGANSLLDLVVFGRAVAHTIADTLQPGLPHKPLPADLGKESIANLDKLRNATGSKPTAEIRLAMQKTMQKDVSVFRTQESLDEGVKNITAVDKTFADVKTTDRSMIWNSDLVETLELQNLLTCATQTAKSAAERKESRGAHAREDYPERDDVNWMKHTLSWQRDSGDEVTLKYRNVIATTLDEKECPPVPPTIRAY

SEQ ID NO: 1434 - protein, 318 aa, Kluyveromyces marxianus
  source 1..318: note = SBI05449_Succinate--CoA ligase subunit alpha
MLRTIGRRFFSREATPYDSTIKNLLLSKDTKVIFQGFTGKQATFHAKISQEYGTNVVGGTNPKKAGQTHLGQPVFASVAEAVKQTGATASGIFVPPPIAAPAIREAIEAEIPLAVAITEGIPQHDMLYIAEMLKSQDKTRLVGPNCPGIISPTARVRIGIQPTSIFKPGKIGIVSKSGTLTYEAVQQTTITDLGQSLVIGIGGDAFPGTDFIDALTLFMNDPQTEGIILLGEIGGTAEIEAAEYLKAYNLTREKPLPVASFIAGTVAGQMKGVRMGHSGAIVEGSGTDAESKKKALRAANVAVVESPGHLGKALLEQF

SEQ ID NO: 1435 - protein, 638 aa, Nakazawaea ishiwadae
  source 1..638: note = SBI05469_Probable succinate dehydrogenase flavoprotein
MLNTLRLSNKRLIAKRSFHTSLTRNQIIADKLNGKNAASLVKNDYHIIDHEYDAIVIGAGGAGLRAAFGLAQDGFKTACISKLFPTRSHTVAAQGGINAALGNMHKDDWHWHMYDTVKGSDWLGDQDAIHYMTREAPQSIIELEHFGVPFSRTEEGRIYQRAFGGQSKEYGKGGQAYRTCAVADRTGHALLHSLYGQALRHNTHFFIEFFAMDLLMDNGECVGVMAYNQEDGTLHRFRAHKTVIATGGYGRAYFSCTSAHTCTGDGYAMVSRAGLPLQDLEFIQFHPSGIYGSGCLITEGARGEGGYLINSEGERFMERYAPHAKDLASRDVVSRAITMEIRAGRGVGPEKDHMFLQLSHIPAEVLKERLPGISETASIFAGVDVTKEPIPILPTVHYNMGGIPTKYTGEVVTLNEKGEDQIVEGLYACGEAACASVHGANRLGANSLLDLVVFGRAVSHTINEKNTPNAPHKQLPADIGYESIANMDKLRTAEGTKSTASIRLDMQKTMQKHCAVFRKQDTLDEGVDKILAIDKDFEHIKTTDRSMIWNSDLVETLELQNLLTCATQTAVSAANRKESRGAHAREDYPTRDDENWMKHTLSYQQNNGDKVELNYRAVISETLDANECKSVPPAIRSY

SEQ ID NO: 1436 - protein, 622 aa, Nakazawaea ishiwadae
  source 1..622: note = SBI05469_NAD-dependent malic enzyme
MTVGQRRFSIEVCEGDSLQHLHTIKTPVGKQAILESINQVAKTTRLSVEGPIECPLTGFQLLNSSLFNKGSAFTEEEREAFDLVGLLPPQVNTLDEQVERAYNQLCYLKTPLLKNDFCVSMRVQNKVLYFELVRRHIRELLPIIYTPTEGDAIAAYSDRFRKPEGCFLNITQPDTIEARLAKFGNDKDIDYMVVSDGEGILGIGDQGVGGVRIAIAKLGLMTLCGGIHPGRVIPVCIDAGTNNERLLNDDLYMGNKFPRVKGKKYDEFVAEFMKVVKEKYPSCIVHFEDFGVTNARRILQKYRNYLPCFNDDIQGTGAVVMASMTLALKITNRDLLESQIVIYGAGSAGLGIADQIVKHMVSHGATEDEARERIHVLDRYGLITKSMTDTSSPDQLLYADEDSYWEGINKKSLLEVVKKIKPTCLVGCSTQAGAFTESIVKLMYKHNTRPIIFPLSNPTRLHEAIPEDLMNWTDNNALIATGSPFKPVDGHVISENNNCFTFPGIGLGSLLARASTISDTMISAGVDKLASLSPALENATAGLLPRLEDIDEVSAQVATAMILQALEEGVARVEDEIVDGVNVKVPRDFKGCLEWVKTQMWKPVYRPLMKVEHVPEIHTHQS

SEQ ID NO: 1437 - protein, 268 aa, Nakazawaea ishiwadae
  source 1..268: note = SBI05469_Succinate dehydrogenase iron-sulfur subunit
MFKNTLISTLKKSSTQQLFYKRSLATVSQDQPPRLKTFKIYRWNPDTPEVKPKMQEYQVDLNKCGPMILDAIIKIKNEQDATLTFRRSCREGICGSCAMNIGGRNTLACLCRIEQDTKTETKIYPLPHMFVVRDLVPDLTHFYKQYKSIQPYLQTDSVPADGKENLQSIEDRKKLDGLYECILCACCSTSCPSYWWNQQQYLGPAVLMQLYRWLIDSRDHASAIRKEMLQNSMSLYRCHTIMNCSKTCPKGLNPGLAIAEIKKQLAFD

SEQ ID NO: 1438 - protein, 306 aa, Nakazawaea ishiwadae
  source 1..306: note = SBI05469_Nitrilase
MGKVVAALQVGSSPEGTKATLNKILSYEQEIIDSKAELVVIPELTLGGYPKGSIFGTYLGFRLQSGREEFAKYYSQAISLPGEESDILAGLSAKTGASLVVGVIEKDGTTLYCTMAFFDPKLGFVAKHRKLMPTATERLLWGQGDGSTLPVVDTSVGKIGGAICWENHLPLLRQAMYAKGVQIWTLPTVDERDIWRTMMKSIAYEGRIFLVSAVQFMPPPKEMGYVLEGWAEDRNCINGGSVIIDPYGEILAGPLLGKEGLLTAEIDISKIVEARYDFDPVGHYARGDVFQLTVDERPKDKVKFLS

SEQ ID NO: 1439 - protein, 324 aa, Nakazawaea ishiwadae
  source 1..324: note = SBI05469_Succinate--CoA ligase subunit alpha
MLGKQFIRKFSSSSKRFADYSKTIPNLKVTSDTKVIFQGFTGKQGTFHAEQALAYGTHIVGGTNPKKAGQTHLGKPVFATVKDAIKETGATLTGIFVPPSIAAKAIEEAIEAEISLAVAITEGIPQHDMLRVHQMLKTQEKTRLVGGNCPGIIAPEQCKIGIMPSNIHKRGKIGVISRSGTLTYEAVNQTTEVGLGQSLVIGIGGDPFPGTNFIDALTLFMNDPETEGIVLIGEIGGTQEEDASEFLKQYNLTRDVPKPVVSFIAGVSSPPGRRMGHAGAIVAGGKGDAKSKISALTSAGVVVEQSPARLGKALYQEFVNKNLL

SEQ ID NO: 1440 - protein, 671 aa, Nakazawaea ishiwadae
  source 1..671: note = SBI05469_Acetyl-coenzyme A synthetase
MTQTNIHKIVHEANGVTLIPTPKEFYAKQPNKSIDQIEQYNEMYQKSIQDPEGFFGPLAKEFLHWDKEFTKVKTGSLQEANSAWFVGGELNACYNCVDRHAFANPAKPAIIFEADDEQESKIVTFGELLRQVSQVAGVLKSWGVGKGDTVAIYLPMTAEAIIAMLAVARIGAIHSVIFAGFSAGSIKDRINDAKCKAVLTCDEGKRGGRVVNIKKIVDEALKECPTVKNVLVYKRTGNEVPFVEGRDGWWQEETLKQRGYLPPTPVNAEDPLFLLYTSGSTGLPKGVVHCTGGYLLGAALTTRYVFDVQSEDVLFTAGDVGWITGHTYALYGPLALGVPSVVFEGTPAYPDYGRLWKIVAKHKATHFYVAPTALRLLKKAGQDEIAKHDLSSLRTLGSVGEPIAPEIWEWYNEHIGKGKCHISDTYWQTESGSHLIAPLAGAIPTKPGSATVPFFGIDAAIIDPVTGKEVEGNDVEGVLAVKSTWPSMARSVWNNHEKYIDTYFKPYPGYYFTGDGAGRDHDGYYWIRGRVDDVVNVSGHRLSTSEIESTLLENHQVSEAAVVGINDELTGQAVIAFVQLKENDGSVELDQLRRSLVLHVRGIIGPFAAPKSVVIVADLPKTRSGKIMRRVLRKITSGEADQLGDMSTLANPQSVEGIIEAVEQQFFATKK

SEQ ID NO: 1441 - protein, 565 aa, Nakazawaea ishiwadae
  source 1..565: note = SBI05469_Pyruvate decarboxylase isozyme
MSDEITVGQYLFERLSQLGVNSIFGVPGDFNLRLLDDIDLVKGSRWAGNANELNAAYAADGYSRVKRLAALITTFGVGELSALNGVAGAYAEHVGLIHIVGTPATSSQQKQLLLHHTLGNGDFTVFHRMSSEISETTVFLEEVSKAASSIDNLLATAYKFQRPVYLGLPTNIAVGKVKRSLLDTPIDLSLKPNDPHVQSEFIESVLDLIKAAKNPVILVDACASRHECKAEVKELVEKTQFPVYVTPMGKGVVDEQNPRFGGAYVGSLSSPEVQEAVESSDLVLSIGALLSDFNTGSFSYHYQTKNIVEFHSDHSKIRSAVFPGIQMKESLQLLLKDVKSAAAGYTPVPVPQTKLLNTPAPANTPISQEWLWTKVSSFFREGDVIITETGTSAFGIVQSRFPNNTTGISQVLWGSIGYTGGATLGAVLGAQEVDPNKRVILFIGDGSLQLTVQEISTMCKLGQTPYLFILNNDGYTIERLIHGKYAEYNAIQSWNHLDLLKLFNAKNSESIRVSTTGEVDKLFADAAFNKNDKIRVIEVMLPMMDAPANLVKQAEFSAKTNATIE

SEQ ID NO: 1442 - protein, 361 aa, Nakazawaea ishiwadae
  source 1..361: note = SBI05469_Alcohol dehydrogenase
MFRQSRILRFQMPAGIPKTQKAMVFEKSGGPLLFKDIPIPVPKPHEILVNVKYSGVCHTDLHAWKGDWPIPTKLPLVGGHEGAGVVVAKGDAVTNFQIGDYAGIKWLNKTCLTCEYCVTGHESNCAHTDLSGYTHDGSFQQYATADAIQAAHIPKGTDLAGVAPILCAGITVYKGLKTANLKPGDWVAISGAGGGLGSLAVQYAVAMGFRVIGIDGGTEKGDLVRSLGAEEFVDFKESSDIVEEIKIKTKGGAHGVLNVAVSEAAITQSTEYVRPSGKVVLISLPANAVAKSPVFSHVLKSISIVGSYVGNRADSAEAIDFFVRGKVKSPIHVVGLSELEKVYELMEAGKIAGRYVLDTSK

SEQ ID NO: 1443 - protein, 641 aa, Nakazawaea ishiwadae
  source 1..641: note = SBI05469_NAD-dependent malic enzyme
MLRTTTSRATTKRLSCLSSTIRFYSKPTSSTNLQSTHLHTHTVKTPIGTQAELQAKLNKPEITRLSVEGPVECDLTGFQLLNSPLFNKGSAFTIEERELFKLNGLLPSQVNDLNEQVDRAYKQLCYLKTPLLKNDFCSSMRVQNKVLYYELVRRHIRELLPIVYTPTEGDAIAAYSHRFRKPEGCFLDISDPDSIADRLSRFGESKDIDYIVVSDGEGILGIGDQGVGGIRIAISKLLLMTLCGGIHPGRVIPICLDTGTNNKNLMNDDLYMGNKFPRVRGEEYDLFVEKFILTVKEKFPSAVVHFEDFGVLNARPILKKFRDTVPCFNDDIQGTGAVVMASMIAALKHTDRELLDSEIVIYGAGSAGLGIADQIVNHMVAHGSSVEDARARIHCLDRKGLITDKSEGNTEDQLKYADRDSEWEGIDKSSLLEVVRKIKPTTLIGCSTQPGAFTEEIIKEMHKHNPRPVVFPLSNPTRLHEAIPADIMKWTNDEALIATGSPFKPVNGHVISENNNCFTFPGIGLGALLSRSSTITDTMISAAVDQLLSLSPALNDPRAGLLPRLEEIDEVSAQVATAMILQALKEGVARIESEKRPDGQQVVVPRDFEGCVEWVKKQMWKPVYRPLVKVEHVPEIHTHQY

SEQ ID NO: 1444 - protein, 431 aa, Nakazawaea ishiwadae
  source 1..431: note = SBI05469_Succinate--CoA ligase subunit beta
MFSKNLNRSLINSVKRVSQARNLSLHEYRSAALLKQYGVKVPGGSAATTPEEAYKIAKDLNSIDLVVKAQALTGGRGKGHFDTGFKSGVHLVSTPEEVQKIAGEMLHHKLITKQTGAAGREVTAVFVVERKFARKEAYLSIIMDRANQQPMIVASSEGGMDIEGVAKETPDAIKTFSIDITIGVTDELALQIASVLGFSKEATPKAAETIQKLYKCFNEKDATQIEINPLSETIDQEVLAIDAKFGFDDNALFRQKDVESWRDVTQEDPDEVLAAESGLNFIKLDGNIGCLVNGAGLAMATMDIIKLYGGQPANFLDCGGGATPETIESAFKLILTEKKVTGIFVNIFGGIVRCDYVAEGLIAAAKNLKLEIPIVARLQGTNVEKAKELIANSGLKIFAFDELDNAAEKVVQLSDIVSKARDVGVKVSFEV

SEQ ID NO: 1445 - protein, 497 aa, Nakazawaea ishiwadae
  source 1..497: note = SBI05469_Aldehyde dehydrogenase 5
MSSLSAKLTFPIINETYEQPTGLFINNEFVKSHSGKTFAVSSPIDEQHLCDVQMADDKDVDFAVDAAYEAFKKWKNVKPYERGEHLYRLAELLDKNSETLAKIESLDNGKSLLCSRYDVSLVVKYIKYCAGYADKLDGRSINTDPEHLTYTKREPLGVCGQITPWNFPLLMWAWKIGPALATGNTVVLKPASATPLSNLFAAKLCKEAGIPAGVVNIVPGPGRTCGEAILNHPKIRKIAFTGSTAIGRDVMVKAAQSNLKKVTLELGGKSPNVVFNDADLDVAVDNLIKGIFFNGGEICFAGSRIFIQDGVYDQVLEKLKIAMNNLKVGNPFEEGVFQGAQATPDQFQTVLDYINVGKSEGAKVLSGAERIGDKGYFVKPTLFYDCSKDMKIVREEIFGPVAAIQKFSTIDEVVESANDSEYGLAAGIHTKDLNKAFAVADRLEAGSVWINTYGDLDHSVPFGGYKESGIGREMGLELFDNYTQVKAVRAKLFVPEA

SEQ ID NO: 1446 - protein, 370 aa, Nakazawaea ishiwadae
  source 1..370: note = SBI05469_Alcohol dehydrogenase
MFSATRLSTRRSVLSRSFLRLNSTIPTTQKGVIFYENGGELQYKDIPVPKPKPNEILINVKYSGVCHSDLHAWKGDWAKKPILPLIGGHEGAGVVVAKGESVRNFEIGDLAGIKWLNGSCMTCEFCQEGNESNCPDADLSGYTHDGSFQQYATADAVQAAKLTPGTDLANVAPILCAGVTVYKALKTADLKAGQWVAISGAAGGLGSLAVQYAKALGLRVIGIDGGPGKEELFKNCGGDVFVDFTTSKDVNLEIIEATNGGPHGVVNVSVSELAISNSCKFVRPTGTVVLVGMPAGAVCKSPVFDHVVKSLKIKGSYVGNRADTREAVDFFARGLVKSPIKIVGLSELPEIYEKMEAGKILGRYVVDTSC

SEQ ID NO: 1447 - protein, 350 aa, Nakazawaea ishiwadae
  source 1..350: note = SBI05469_Alcohol dehydrogenase
MPAGIPKTQKAVIFEKNGGPLLYKDIPVPVPKPNEILVNVKYSGVCHTDLHAWKGDWPLATKLPLVGGHEGAGIVVAKGDSVNNFEIGDYAGIKWLNKTCLSCEHCMVGRESNCPDVDLSGYTHDGSFQQYATADAIQAAHIPKGTDLAAVSPILCAGITVYKGLKTANLKPGDWVAISGAGGGLGSLAVQYATAMGLRVIGIDGGEEKANMVKNLGAEEFVDYTVSKDVVEEIKQKTGGGTHGVINVAVAEKAILQSTQYVRAGGKVVLISLPAHAVAKSPVFHHVTNCLSMLGSYVGNRADSAEAIEFFTRGKVKSPIQIVGLSELEKVYDLMEAGKIAGRYVLDTSR

SEQ ID NO: 1448 - protein, 555 aa, Nakazawaea ishiwadae
  source 1..555: note = SBI05469_Malate synthase
MLTYGSLEGVEVLGKIDSTPKYDSEITPLDILTKDALRFVTLLHRSFNETRKQLLLNRQEVQKKLDNGEQLKFLPETLYIRDDANWKCKPPAPGLVDRRTEITGPPERKMIVNALNTDVLTYMTDFEDSCSPTWENMIYGQVNLHDAIRCKIDFTLSTTGKNYKVNRAGRHVPTIIVRPRGWHMLEKHITVDGEPMSASILDFGLYFYHNAKELIKLGKGPYFYLPKMEHHLEAKLWNDIFNVAQDCLALARGSISATVLIETLPAAYQMDEILYQLRDHSSGLNCGRWDYIFNTIKRFRNSPSHILPDRGQVTMKSPFMSAYVSRLIKICHKRGVHAMGGMAAQIPIKTDLKLNEVAMGNVEADKLREVLAGHDGTWVAHPLLAPIANKVFNTHMPTPNQLHKPLATEDITESQLSDTKIPGGAITTDGIKINLYIGLNYMESWVQGFGCVPINNLMEDAATAEVSRLQLWAWCKHGVELQDTKQKCTVELVNKMIDDEVSKLSNLKTDNKFKLVGEMLKDEISGKVEVSEFLTDPLYDHILTLTEPFALQNLK

SEQ ID NO: 1449 - protein, 522 aa, Nakazawaea ishiwadae
  source 1..522: note = SBI05469_Aldehyde dehydrogenase 5
MLRTSTLRLALKANQAPLVNAIRFYSSQLPLSVPITLPNGIKYEQPTGLFINNEFVQSQQGKTFEVVNPSTEETITEVYESREEDVDIAVEAALKAFNSEWSTGDPSFRGRCLYKLADLLEEHLETLAGIESLDNGKALGSARGDVGLVVAYIRSCAGWADKINGSIVETGDTHFNYTRREPLGVCGQIIPWNFPLLMWSWKVGPALATGNTVVLKTAESTPLSALYASQLCKEAGIPAGVVNIVSGFGKITGNAIASHKKIKKVAFTGSTATGRVIMKLAAESNLKKITLELGGKSPNIVFADADIKKAVQNIILGIYYNSGEVCCAGSRVYVEESLYDEVLQEFKLALELVKVGNPFEEGVFQGAQTSINQMKKILGFIETGKSEGATLITGGERLGDKGYFIKPTIFGDVTEDMRIVKEEIFGPVVTITKFKTVDEVIDLANNTEYGLAGGVHTTDINKLIKVSNSIKAGTIWVNTYNDFHPMVPFGGFGESGIGREMGKEALDNYTQVKAVRVGLSKV

SEQ ID NO: 1450 - protein, 551 aa, Nakazawaea ishiwadae
  source 1..551: note = SBI05469_Malate synthase
MAVNNSPFPTSKDLLKNVEIKGSIHSDEIRSKILNPELLSFVATLHRTFNKQRLNLLKKRVEYQRERDNGKLPNFLPETEAIREDKTWTGPKLAPGLVDRRVEITGPTDRKMVINALNSKVATYMADFEDSLTPNWFNVIDGQLNLYDAVRRTISLESPKKTYKLNGEHVPTLIVRPRGWHLNEKHVLVDGEEISGSLFDFGLYFFNNAKETLKQGFGPYFYLPKMEHHLEAKLWNDVFEFAQDYVGIDRGTIRGTVLIETIPAVFQMDEIIYQLRPHIAGLNCGRWDYLFSYIKCFRNNKNFILPDRSQVTMTVPFMANYVKLLIRTCHRRKVHAMGGMAALIPIKNDEALNAKAMDSVRNDKLREVLAGHDGTWIAHPALLDISLEIFNKHMPGKNQINVSRYEDLTISNFDLLTPYVPNAAITDNGVRTNIRVGLIYIANWLKGIGCSPINYLMEDAATAEVSRSQLNQWFKHGITTKEGILIDSSYLTKALKEESGNLQFEPKVLQKLVAYYKKQILDEKFDDFLTLEMYDEVSKTDTTRSVDGAKL

SEQ ID NO: 1451 - protein, 522 aa, Nakazawaea ishiwadae
  source 1..522: note = SBI05469_Aldehyde dehydrogenase 5
MFRLRTVTAPLNKHTLRLSTRFYSQIPLSVPITLPNGTTYEQPTGLFINNEFVQSHEHKSFEVINPSTEETICEVSEARKSDVDAAVEAAHNAFEHSNWATQDPIERGKVLYKLAELIDKNNELLANIESLDNGKSLLCSRGDVTLVANYLRSCAGWCDKINGSVLETGNTHFNYTKREPLGVCGQIIPWNFPLLMWSWKIGPALATGNTVVIKTAELTPLSALYLAKLCVEAGIPPGVVNVVSGFGKICGEAISTHPKIKKIAFTGSTQTGVQIMKLAAESNLKKVTLELGGKSPNIVFNDADIAKLVKNIAIGIFYNSGEVCCAGSRIYVQSGVYEQVLEEFAKFANDLKVGNPFLEETFQGAQTSQMQLDKILNYIQIGQGEGARLVAGGERIGDKGYFIKPTIFADVKEDFRIVKEEIFGPVVTVSKFDTVDEVIQYANDSEYGLAAGIHTKDINKAVTVANRIQAGTVWVNTYNDFHQMVPFGGYGESGIGREMGADALDNYTQTKAVRISIDQNSN

SEQ ID NO: 1452 - protein, 448 aa, Nakazawaea ishiwadae
  source 1..448: note = SBI05469_Isocitrate dehydrogenase
MSFSTMLRTRAIANSAMNSSSCFLSRFQTYRSFHQSYQNLDKIKVKNPIVEMDGDEMTRIIWKIIKDKLINPYLEVDLKYYDLSVTSRDATDDKITVEAAEAIKKYGVGVKCATITPDEQRVEEFNLKQMWKSPNGTIRNILGGTVFREPIIIGDKVPRIVPNWSEPIIIGRHAHGDQYKATDLIVPGAGTLELKYTPKDGGEAQILNVYDYKGAGIGLAMYNTDESITGFAHSSFKMAILKKKDLKLATKNTILKKYDGRFKDIFQEIYDSTYKSEFAKLGITYEHRLIDDIVAQMIKSTGGFVLALKNYDGDVQSDIVAQGFGSLGLMTSVLVTPDGKAFEAEAAHGTVTRHYRQHQQGKETSTNSIASIFAWTRGLIQRGKLDNTPDVVKFAETLEQIVIDTVQIDGIMTKDLALAGGNTDRSAWVTTTEFLDAVANKLQKKINV

SEQ ID NO: 1453 - protein, 337 aa, Nakazawaea ishiwadae
  source 1..337: note = SBI05469_Malate dehydrogenase
MFAATTKINLRRQFSTTASTAYKAVVLGAAGGIGQPLSLLMKLNHKVTDLALYDLRLAPGVAADISHIPVNSTVTGYTPENDGLAKALKGADVVLIPAGVPRKPGMTRDDLFNINASIVRDLAKAVADNAPDAAVCVISNPVNSTVPIVAEVFKSKGVYNPKKLFGVTTLDVLRASRFTSEVKNTDPTREKVTVVGGHSGITIVPLLSQTTHRFDDETRDALINRIQFGGDEVVQAKNGAGSATLSMAQAGARFASAVLNGLAGEQDVTEPTFVDSPLFKSEGIDFFASKVTLGVDGVKEIHGLGSLSSHEEELVATAKETLKKNIAKGVEFVKQNP

SEQ ID NO: 1454 - protein, 669 aa, Nakazawaea ishiwadae
  source 1..669: note = SBI05469_Acetyl-coenzyme A synthetase
MPHQEKEHLLHEHAMQPPLGFLERHPTGKPHLKNFDEYLKLYKESIENPEKFFGEKAAELLDWSTPFTHLRYPSNANGFNKDTSDGAAWFLGGELNASYNCVDRHALANPDKPLIIYEADEPNEGYTLTYGQLLKDVCQVAQILKEMGVKKGDTVAVYLPMIPEAITTLMAITRIGAIHSVVFAGFSASSLRDRINDANSKIVITADEGKRGGKIIETKKIVDEALKNCPQVSNVLVFKRTGNSHIPWVKGRDLWWHEEIIKYTPYTPPVPVSSEDSLFLLYTSGSTGKPKGIQHTTAGYLLGALMTTKYVFDVHSHDILFTAGDIGWITGHTYVVYGPLLNGATTVVFEGTPAYPNYSRYWEIVDKYKVTQFYVAPTALRLLKRAGTKYVAKHDLSSIRALGSVGEPIAAEVWEWYNENVGRGKAHICDTYWQTETGSHIIAPLAGVTPTKAGSASFPFFGIDPVILDPVSGEELKGTEVEGVLCVRNPWPSMARSVWNDYNRFLDTYLRPFKGYYFTGDGAARDKDGFYWILGRVDDVVNVSGHRLSTAEIESALIEHEMVAESAVVGFPDELTGSAVAAFVSLKDKSNNSNEVKKELVLTVRKEIGPFASPKLILLVNDLPKTRSGKIMRRILRKILAGEEDSLGDISTLSNPEVVEHLIEVAHAQ

SEQ ID NO: 1455 - protein, 349 aa, Nakazawaea ishiwadae
  source 1..349: note = SBI05469_Alcohol dehydrogenase
MSSIPKVQKAVVFEKNGGPLTYQDYPVPVPKSNELLINVKYSGVCHTDLHAWKGDWPLDTKLPLVGGHEGAGIVVGMGSAVKGWKLGDYAGIKWLNGSCLNCEFCEKGAESNCAQADLSGYTHDGSFQQYATADAVQAAKIPKGTDLAEIAPILCAGVTVYKALKTAELRAGEWVCISGAGGGLGSLAIQYGKAMGYRVLAIDGGEEKGKLCKDLGAEAYIDFTKTKDLVKDVVDITKGGAHGVINVSVSEKAIETSTEYVRNCGTVVLVGLPAGAVCKSEVFSHVVKSIQIKGSYVGNRADTREAIDFFARGLVKSPIKVVGLSELPSVYDLMAKGAILGRYVLDTSK

SEQ ID NO: 1456 - protein, 713 aa, Saccharomyces cerevisiae; identical to SEQ ID NO: 1121
  source 1..713: note = SBI05473_Acetyl-coenzyme A synthetase

SEQ ID NO: 1457 - protein, 554 aa, Saccharomyces cerevisiae
  source 1..554: note = SBI05473_Malate synthase 1
MVKISLDNTALYADIDTTPQFEPSKTTVADILTKDALEFIVLLHRTFNSRRKQLLANRSNLQSKLDSGEYRFDFLPETEQIRNDPTWQGAIPAPGLINRSSEITGPPLRNMLVNALNAEVTTYMTDFEDSSSPTWENMIDGQVNLYDAIRNQIDFKTPRKEYRLKDDISRLPTLIVRPRGWHMVEKHLYIDDEPISASIFDFGLYFYHNAKELVKIGKGPYFYLPKMEHHMEVKLWNDIFCVAQDFIGMPRGTIRATVLIETLPAAFQMEEIIYQIREHSSGLNCGRWDYIFSTIKKLRNLPEHVLPNRDLVTMTSPFMDAYVKRLINTCHRRGVHAMGGMAAQIPIKDDPKANEAAMNKVRNDKIREMKNGHDGSWVAHPALAPICNEVFSNMGTANQIYFVPDVHVTSSDLLNTKIQDAQVTTEGIRVNLDIGLQYMEAWLRGSGCVPINHLMEDAATAEVSRCQLYQWVKHGVVLSDTGDKVTPELTAKILNEETAKLASASPLGEKNKFALAAKYFLPEVTGKIFSDFLTTLLYDEIIKPSAKPVDLSKL

SEQ ID NO: 1458 - protein, 322 aa, Saccharomyces cerevisiae
  source 1..322: note = SBI05473_nitrilase
MAKHIVAALQIGSCPGSTKDTLKKILSYEKKIKESGAKLVVIPEATLGGYPKGSNFGVYLGYRLQEGREEYAKYLAEAIEIGNGEKYPEISQLCALSKATDASLCVGCIERDGTTLYCTMVYIDPKDGYVGKHRKLMPTAGERLIWGQGDGSTLPVVDTAAGKIGGAICWENMMPRLRYAMCKKGVEIWCAPTVDARPIWRTVMKNIAYEGRLFLISAVQFMPDATAMGFGEIIDQATGKRKLPGWPSADDNCINGGSVIIDPYGEIIAGPLIGQEGLLTAEINTDLIAEARFDLDPVGHYARGDVFQLTVNERSHDVKFTK

SEQ ID NO: 1459 - protein, 242 aa, Saccharomyces cerevisiae
  source 1..242: note = SBI05473_Alcohol dehydrogenase
MSSVTGFYIPPISFFGEGALEETADYIKSKDYKKALIVTDPGIAAIGLSGRVQKMLEERGLNVAIYDKTQPNPNIANVTAGLKVLKEENSEIVVSIGGGSAHDNAKAIALLATNGGEIGDYEGVNQSKKAALPLFAINTTAGTASEMTRFTIISNEEKKIKMAIIDNNVTPAVAVNDPSTMFGLPPALTAATGLDALTHCIEAYVSTASNPITDACALKGIDLINESLVAAYKDGKDKKARN

SEQ ID NO: 1460 - protein, 563 aa, Saccharomyces cerevisiae
  source 1..563: note = SBI05473_Pyruvate decarboxylase isozyme
MSEITLGKYLFERLKQVNVNTIFGLPGDFNLSLLDKIYEVDGLRWAGNANELNAAYAADGYARIKGLSVLVTTFGVGELSALNGIAGSYAEHVGVLHVVGVPSISAQAKQLLLHHTLGNGDFTVFHRMSANISETTSMITDIATAPSEIDRLIRTTFITQRPSYLGLPANLVDLKVPGSLLEKPIDLSLKPNDPEAEKEVIDTVLELIQNSKNPVILSDACASRHNVKKETQKLIDLTQFPAFVTPLGKGSIDEQHPRYGGVYVGTLSKQDVKQAVESADLILSVGALLSDFNTGSFSYSYKTKNVVEFHSDYVKVKNATFPGVQMKFALQNLLKVIPDVVKGYKSVPVPTKTPANKGVPASTPLKQEWLWNELSKFLQEGDVIISETGTSAFGINQTIFPKDAYGISQVLWGSIGFTTGATLGAAFAAGEIDPNKRVILFIGDGSLQLTVQEISTMIRWGLKPYLFVLNNDGYTIEKLIHGPHAEYNEIQTWDHLALLPAFGAKKYENHKIATTGEWDALTTDSEFQKNSVIRLIELKLPVFDAPESLIKQAQLTAATNAKQ

SEQ ID NO: 1461 - protein, 329 aa, Saccharomyces cerevisiae
  source 1..329: note = SBI05473_Succinate--CoA ligase subunit alpha
MLRSTVSKASLKICRHFHRESIPYDKTIKNLLLPKDTKVIYQGFTGKQGTFHASISQEYGTNVVGGTNPKKAGQTHLGQPVFASVKDAIKETGATASAIFVPPPIAAAAIKESIEAEIPLAVCITEGIPQHDMLYIAEMLQTQDKTRLVGPNCPGIINPATKVRIGIQPPKIFQAGKIGIISRSGTLTYEAVQQTTKTDLGQSLVIGMGGDAFPGTDFIDALKLFLEDETTEGIIMLGEIGGKAEIEAAQFLKEYNFSRSKPMPVASFIAGTVAGQMKGVRMGHSGAIVEGSGTDAESKKKALRDVGVDVVESPGYLGQALLDQFAKFK

SEQ ID NO: 1462 - protein, 519 aa, Saccharomyces cerevisiae
  source 1..519: note = SBI05473_Aldehyde dehydrogenase 5
MFSRSTLCLKTSASSIGRLQLRYFSHLPMTVPIKLPNGLEYEQPTGLFINNKFVPSKQNKTFEVINPSTEEEICHIYEGREDDVEEAVQAADRAFSNGSWNGIDPIDRGKALYRLAELIEQDKDVIASIETLDNGKAISSSRGDVDLVINYLKSSAGFADKIDGRMIDTGRTHFSYTKRQPLGVCGQIIPWNFPLLMWAWKIAPALVTGNTVVLKTAESTPLSALYVSKYIPQAGIPPGVINIVSGFGKIVGEAITNHPKIKKVAFTGSTATGRHIYQSAAAGLKKVTLELGGKSPNIVFADAELKKAVQNIILGIYYNSGEVCCAGSRVYVEESIYDKFIEEFKAASESIKVGDPFDESTFQGAQTSQMQLNKILKYVDIGKNEGATLITGGERLGSKGYFIKPTVFGDVKEDMRIVQEEIFGPVVTVTKFKSADEIINMANDSEYGLAAGIHTSNINTALKVADRVNAGTVWINTYNDFHHAVPFGGFNASGLGREMSVDALQNYLQVKAVRAKLDE

SEQ ID NO: 1463 - protein, 683 aa, Saccharomyces cerevisiae; identical to SEQ ID NO: 1104
  source 1..683: note = SBI05473_Acetyl-coenzyme A synthetase

SEQ ID NO: 1464 - protein, 146 aa, Saccharomyces cerevisiae
  source 1..146: note = SBI05473_Succinate dehydrogenase assembly factor 2
MHNMFPALTKTLSLQGYKIINSQTGSAAWSCGRRWFSSDKDDHDDVVTRIKIAPIKRTNEPLDKKRARLIYQSRKRGILETDLLLSGFAAKYLKKMNEEELEEYDSLLNDPLPDKWANSKLLKQLQEFSENKEKEILSMPALSKYQ

SEQ ID NO: 1465 - protein, 348 aa, Saccharomyces cerevisiae
  source 1..348: note = SBI05473_Alcohol dehydrogenase
MSIPETQKGVIFYESHGKLEYKDIPVPKPKSNEILINVKYSGVCHTDLHAWHGDWPLPTKLPLVGGHEGAGVVVGMGENVKGWKIGDYAGIKWLNGSCMACEYCELGNESNCAKADLSGYTHDGSFQQYATADAVQAAHIPQGTDLAEVAPVLCAGITVYKALKSANLMAGHWVAISGAAGGLGSLAIQYAKAMGYRVLGIDGGEGKEELFRSIGGEVFIDFTKEKDIVGAVLKATDGGAHGVINVSVSEAAIEASTRYVRANGTTVLVGMPAGAKCCSDVFNQVVKSISIVGSYVGNRADTREALDFFARGLIKSPIKVVGLSTLPEIYEKMEKGQIVGRYVVDTSK

SEQ ID NO: 1466 - protein, 440 aa, Saccharomyces cerevisiae
  source 1..440: note = SBI05473_Pyruvate decarboxylase isozyme
MLTSTSISQDNWVLSILDQFNNSSNSFSFSFSVVWLQRPVYLGLPANLVDLNVPAKLLETPIDLSLKPNDAEAEAEVVRTVVELIKDAKNPVILADACASRHDVKAETKKLMDLTQFPVYVTPMGKGAIDEQHPRYGGVYVGTLSRPEVKKAVESADLILSIGALLSDFNTGSFSYSYKTKNIVEFHSDHIKIRNATFPGVQMKFALQKLLDAIPEVVKDYKPVAVPARVPITKSTPANTPMKQEWMWNHLGNFLREGDIVIAETGTSAFGINQTTFPTDVYAIVQVLWGSIGFTVGALLGATMAAEELDPKKRVILFIGDGSLQLTVQEISTMIRWGLKPYIFVLNNNGYTIEKLIHGPHAEYNEIQGWDHLALLPTFGARNYETHRVATTGEWEKLTQDKDFQDNSKIRMIEVMLPVFDAPQNLVKQAQLTAATNAKQ

SEQ ID NO: 1467 - protein, 266 aa, Saccharomyces cerevisiae
  source 1..266: note = SBI05473_Succinate dehydrogenase iron-sulfur subunit
MLNVLLRRKAFCLVTKKGMATATTAAATHTPRLKTFKVYRWNPDEPSAKPHLQSYQVDLNDCGPMVLDALLKIKDEQDSTLTFRRSCREGICGSCAMNIGGRNTLACICKIDQNESKQLKIYPLPHMFIVKDLVPDLTNFYQQYKSIQPYLQRSSFPKDGTEVLQSIEDRKKLDGLYECILCACCSTSCPSYWWNQQQYLGPAVLMQAYRWLIDSRDQASRARKEMLQNSMSLYRCHTIMNCSRTCPKGLNPGLAIAEIKKSLAFA

SEQ ID NO: 1468 - protein, 542 aa, Saccharomyces cerevisiae
  source 1..542: note = SBI05473_Pyruvate decarboxylase isozyme
MSEITLGKYLFERLKPSQLKGMRWAGNANELNAAYAADGYARIKGMSCIITTFGVGELSALNGIAGSYAEHVGVLHVVGVPSISAQAKQLLLHHTLGNGDFTVFHRMSANISETTAMITDIATAPAEIDRCIRTTYVTQRPVYLGLPANLVDLNVPAKLLQTPIDMSLKPNDAESEKEVIDTILALVKDAKNPVILADACCSRHDVKAETKKLIDLTQFPAFVTPMGKGSIDEQHPRYGGVYVGTLSKPEVKEAVESADLILSVGALLSDFNTGSFSYSYKTKNIVEFHSDHMKIRNATFPGVQMKFVLQKLLTTIADAAKGYKPVAVPARTPANAAVPASTPLKQEWMWNQLGNFLQEGDVVIAETGTSAFGINQTTFPNNTYGISQVLWGSIGFTTGATLGAAFAAEEIDPKKRVILFIGDGSLQLTVQEISTMIRWGLKPYLFVLNNDGYTIEKLIHGPKAQYNEIQGWDHLSLLPTFGAKDYETHRVATTGEWDKLTQDKSFNDNSKIRMIEIMLPVFDAPQNLVEQAKLTAATNAKQ

SEQ ID NO: 1469 - protein, 500 aa, Saccharomyces cerevisiae; identical to SEQ ID NO: 1087
  source 1..500: note = SBI05473_Magnesium-activated aldehyde dehydrogenase

SEQ ID NO: 1470 - protein, 486 aa, Saccharomyces cerevisiae; identical to SEQ ID NO: 1088
  source 1..486: note = SBI05473_Citrate synthase 3

SEQ ID NO: 1471 - protein, 351 aa, Saccharomyces cerevisiae; identical to SEQ ID NO: 1120
  source 1..351: note = SBI05473_Alcohol dehydrogenase

SEQ ID NO: 1472 - protein, 420 aa, Saccharomyces cerevisiae; identical to SEQ ID NO: 1093
  source 1..420: note = SBI05473_Isocitrate dehydrogenase

SEQ ID NO: 1473 - protein, 554 aa, Saccharomyces cerevisiae; identical to SEQ ID NO: 1094
  source 1..554: note = SBI05473_Malate synthase 1

SEQ ID NO: 1474 - protein, 634 aa, Saccharomyces cerevisiae
  source 1..634: note = SBI05473_Probable succinate dehydrogenase flavoprotein
MLSLKKGITKSYILQRTFTSSSVVRQIGEVKSESKPPAKYHIIDHEYDCVVVGAGGAGLRAAFGLAEAGYKTACLSKLFPTRSHTVAAQGGINAALGNMHPDDWKSHMYDTVKGSDWLGDQDAIHYMTREAPKSVIELEHYGMPFSRTEDGRIYQRAFGGQSKDFGKGGQAYRTCAVADRTGHAMLHTLYGQALKNNTHFFIEYFAMDLLTHNGEVVGVIAYNQEDGTIHRFRAHKTVIATGGYGRAYFSCTSAHTCTGDGNAMVSRAGFPLEDLEFVQFHPSGIYGSGCLITEGARGEGGFLLNSEGERFMERYAPTAKDLASRDVVSRAITMEIRAGRGVGKNKDHILLQLSHLPPEVLKERLPGISETAAVFAGVDVTQEPIPVLPTVHYNMGGIPTKWTGEALTIDEETGEDKVIPGLMACGEAACVSVHGANRLGANSLLDLVVFGRAVANTIADTLQPGLPHKPLASNIGHESIANLDKVRNARGSLKTSQIRLNMQRTMQKDVSVFRTQDTLDEGVRNITEVDKTFEDVHVSDKSMIWNSDLVETLELQNLLTCATQTAVSASKRKESRGAHAREDYAKRDDVNWRKHTLSWQKGTSTPVKIKYRNVIAHTLDENECAPVPPAVRSY

SEQ ID NO: 1475 - protein, 427 aa, Saccharomyces cerevisiae
  source 1..427: note = SBI05473_Succinate--CoA ligase subunit beta
MYSRKSISLISKCGQLSRLNAQAALQARRHLSIHEYRSAQLLREYGIGTPEGFPAFTPEEAFEAAKKLNTNKLVIKAQALTGGRGKGHFDTGYKSGVHMIESPQQAEDVAKEMLNHNLITKQTGIAGKPVSAVYIVKRVDTKHEAYLSILMDRQTKKPMIIASSQGGMNIEEVAERTPDAIKKFSIETSKGLSPQMAKDVAKSLGFSPDAQDEAAKAVSNLYKIFMERDATQVEINPLSEIEHDPTHKIMCTDAKFGFDDNASFRQEKIYSWRDLSQEDPDEVKAKKYDLNFVKLKGNIGCLVNGAGLAMATMDVIKLNGGDPANFLDCGGGATPETIKQGFELILSNKNVDAIFVNIFGGIVRCDYVALGLVEAARELEVRVPIVARLQGTKVEEGRDIINKSGVKIYSFDELDPAAKKVVELTQN

SEQ ID NO: 1476 - protein, 635 aa, Saccharomyces cerevisiae
  source 1..635: note = SBI05473_Transaminated amino acid decarboxylase
MAPVTIEKFVNQEERHLVSNRSATIPFGEYIFKRLLSIDTKSVFGVPGDFNLSLLEYLYSPSVESAGLRWVGTCNELNAAYAADGYSRYSNKIGCLITTYGVGELSALNGIAGSFAENVKVLHIVGVAKSIDSRSSNFSDRNLHHLVPQLHDSNFKGSNHKVYHDMVKDRVACSVAYLEDIETACDQVDNVIRDIYKYSKPGYIFVPADFADMSVTCDNLVNVPRISQQDCIVYPSENQLSDIINKITSWIYSSKTPAILGDVLTDRYGVSNFLNKLICKTGIWNFSTVMGKSVIDESNPTYMGQYNGKEGLKQVYEHFELCDLVLHFGVDINEINNGHYTFTYKPNAKIIQFHPNYIRLVDTRQGNEQMFKGINFAPILKELYKRIDVSKLSLQYDSNVTQYTNETMRLEDPTNGQSSIITQVHLQKTMPKFLNPGDVVVCETGSFQFSVRDFAFPSQLKYISQGFFLSIGMALPAALGVGIAMQDHSNAHINGGNVKEDYKPRLILFEGDGAAQMTIQELSTILKCNIPLEVIIWNNNGYTIERAIMGPTRSYNDVMSWKWTKLFEAFGDFDGKYTNSTLIQCPSKLALKLEELKNSNKRSGIELLEVKLGELDFPEQLKCMVEAAALKRNKK

SEQ ID NO: 1477 - protein, 549 aa, Saccharomyces cerevisiae
  source 1..549: note = SBI05473_Amidase
MTVHSTWKEKVQLKKDQLNSKIKDEWKLNSTTITRLKNDKKNLIKNIDDLCSSSENQITHSTIMALRQALEAKELSCHEITAAFCHRAALIHQVVNCLSEIMFSEALRLADYYDSNRPAILPPLYGIPISLKDQCNVEGVDTSLGYLCRTFKPKTKNEESLIVSFLRDLGTIIFVKTTVPSSMMATDTQSNTFGYTYNSINLSFSSGGSSGGEGSLIGAHGSLLGLGTDIGGSIRIPSSYQGLFGLKPTFGRVPYLRVDNSFEGRETIPSVIGPLARDLSDLRYFMSCVINICQPWVQDVKCIPYHFDSSTSKLHDNYVVGIWYGDGVIDPPPSDIRALKTCEDLVNKTKGMKAVKWEPSSELSRELFDLANEADVADSGNEIKNEFEISGEPLLDILKPMVLENGRPPYTVNEWWDLTKRVYNAQQLMRDYYLSFPESERPDVIISPTTLMPFRPGDMLKTTLRYILLFNVLNFPSLSIPVGSVDCQIDGLMDTTSALNPEDKMIKTYWNDLIQSGEIDGFPIGLQVVSPTFNDNEVCKFASWLFSKI

SEQ ID NO: 1478 - protein, 496 aa, Saccharomyces cerevisiae
  source 1..496: note = SBI05473_aromatic amino acid aminotransferase
MTAGSAPPLENRSLKSFWDASDISDDVIELAGGMPNERFFPIESMDLKISKVPFNDNPKWHNSFTTAHLDLGSPSELPIARSFQYAETKGLPPLLHFVKDFVSRINRPAFSDETESNWDVILSGGSNDSMFKVFETICDESTTVMIEEFTFTPAMSNVEATGAKVIPIKMNLTFDRESQGIDVEYLTQLLDNWSTGPYKDLNKPRVLYTIATGQNPTGMSVPQWKREKIYQLAQRHDFLIVEDDPYGYLYFPSYNPQEPLENPYHSSDLTTERYLNDFLMKSFLTLDTDARVIRLETFSKIFAPGLRLSFIVANKFLLQKILDLADITTRAPSGTSQAIVYSTIKAMAESNLSSSLSMKEAMFEGWIRWIMQIASKYNHRKNLTLKALYETESYQAGQFTVMEPSAGMFIIIKINWGNFDRPDDLPQQMDILDKFLLKNGVKLVLGYKMAVCPNYSKQNSDFLRLTIAYARDDDQLIEASKRIGSGIKEFFDNYKS

SEQ ID NO: 1479 - protein, 412 aa, Saccharomyces cerevisiae
  source 1..412: note = SBI05473_Isocitrate dehydrogenase
MTKIKVANPIVEMDGDEQTRIIWHLIRDKLVLPYLDVDLKYYDLSVEYRDQTNDQVTVDSATATLKYGVAVKCATITPDEARVEEFHLKKMWLSPNGTIRNILGGTVFREAIIIPRIPRLVPQWEKPIIIGRHAFGDQYKATDVIVPEEGELRLVYKSKSGTHDVDLKVFDYPEHGGVAMMMYNTTDSIEGFAKASFELAIERKLPLYSTTKNTILKKYDGRFKDVFEAMYARSYKEKFESLGIWYEHRLIDDMVAQMLKSKGGYIIAMKNYDGDVQSDIVAQGFGSLGLMTSVLMTPDGKTFESEAAHGTVTRHFRQHQQGKETSTNSIASIFAWTRGIIQRGKLDNTPDVVKFGQILESATVNTVQEDGIMTKDLALILGKSERSAYVTTEEFIDAVESRLKKEFEAAAL

SEQ ID NO: 1480 - protein, 640 aa, Saccharomyces cerevisiae
  source 1..640: note = SBI05473_Probable succinate dehydrogenase flavoprotein
MLSLKKSALSKLTLLRNTRTFTSSALVRQTQGSVNGSASRSADGKYHIIDHEYDCVVIGAGGAGLRAAFGLAEAGYKTACISKLFPTRSHTVAAQGGINAALGNMHKDDWHWHMYDTVKGSDWLGDQDSIHYMTREAPKSIIELEHYGVPFSRTENGKIYQRAFGGQTKEYGKGAQAYRTCAVADRTGHALLHTLYGQALRHDTHFFIEYFALDLLTHNGEVVGVIAYNQEDGTIHRFRAHKTIIATGGYGRAYFSCTSAHTCTGDGYAMVSRAGLPLEDMEFVQFHPSGIYGSGCLITEGARGEGGFLLNSEGERFMERYAPTAKDLACRDVVSRAITMEIREGRGVGKKKDHMYLQLSHLPPEVLKERLPGISETAHIFAGVDVTKEPIPILPTVHYNMGGIPTKWNGEALTIDEETGEDKVIPGLMACGEAACVSVHGANRLGANSLLDLVVFGRAVAHTVADTLQPGLPHKPLPSDLGKESIANLDKLRNANGSRSTAEIRMNMKQTMQKDVSVFRTQSSLDEGVRNITAVEKTFDDVKTTDRSMIWNSDLVETLELQNLLTCASQTAVSAANRKESRGAHARDDYPNRDDEHWMKHTLSWQKDVAAPVTLKYRRVIDHTLDEKECPSVPPTVRAY

SEQ ID NO: 1481 - protein, 669 aa, Saccharomyces cerevisiae; identical to SEQ ID NO: 1107
  source 1..669: note = SBI05473_NAD-dependent malic enzyme

SEQ ID NO: 1482 - protein, 428 aa, Saccharomyces cerevisiae
  source 1..428: note = SBI05473_Isocitrate dehydrogenase
MSMLSRRLFSTSRLAAFSKIKVKQPVVELDGDEMTRIIWDKIKKKLILPYLDVDLKYYDLSVESRDATSDKITQDAAEAIKKYGVGIKCATITPDEARVKEFNLHKMWKSPNGTIRNILGGTVFREPIVIPRIPRLVPRWEKPIIIGRHAHGDQYKATDTLIPGPGSLELVYKPSDPTTAQPQTLKVYDYKGSGVAMAMYNTDESIEGFAHSSFKLAIDKKLNLFLSTKNTILKKYDGRFKDIFQEVYEAQYKSKFEQLGIHYEHRLIDDMVAQMIKSKGGFVMALKNYDGDVQSDIVAQGFGSLGLMTSVLMTPDGKAFESEAAHGTVTRHYRKYQKGEETSTNSIASIFAWSRGLLKRGELDNTPALCKFANILESATLNTVQQDGIMTKDLALACGNNERSAYVTTEEFLDAVEKRLQKEIKSIE

SEQ ID NO: 1483 - protein, 343 aa, Saccharomyces cerevisiae; identical to SEQ ID NO: 1119
  source 1..343: note = SBI05473_Malate dehydrogenase

SEQ ID NO: 1484 - protein, 348 aa, Saccharomyces cerevisiae; identical to SEQ ID NO: 1100
  source 1..348: note = SBI05473_Alcohol dehydrogenase

SEQ ID NO: 1485 - protein, 506 aa, Saccharomyces cerevisiae; identical to SEQ ID NO: 1099
  source 1..506: note = SBI05473_Aldehyde dehydrogenase [NAD(P)+]

SEQ ID NO: 1486 - protein, 506 aa, Saccharomyces cerevisiae
  source 1..506: note = SBI05473_Aldehyde dehydrogenase [NAD(P)+]
MPTLYTDIEIPQLKISLKQPLGLFINNEFCPSSDGKTIETVNPATGEPITSFQAANEKDVDKAVKAARAAFDNVWSKTSSEQRGIYLSNLLKLIEEEQDTLAALETLDAGKPFHSNAKQDLAQIIELTRYYAGAVDKFNMGETIPLTFNKFAYTLKVPFGVVAQIVPWNYPLAMACRKMQGALAAGNTVIIKPAENTSLSLLYFATLIKKAGFPPGVVNVIPGYGSVVGKALGTHMDIDKISFTGSTKVGGSVLEASGQSNLKDITLECGGKSPALVFEDADLDKAIEWVANGIFFNSGQICTANSRVYVQSSIYDKFVEKFKETAKKEWDVAGKFDPFDEKCIVGPVISSTQYDRIKSYIERGKKEEKLDMFQTSEFPVSGAKGYFIPPTIFTDVPETSKLLRDEIFGPVVVVSKFTNYDDALKLANDTCYGLASAVFTKDVKKAHMFARDIKAGTVWINQTNQEEAKVPFGGFKMSGIGRESGDTGVDNYLQIKSVHVDLSLDK

SEQ ID NO: 1487 - protein, 196 aa, Saccharomyces cerevisiae
  source 1..196: note = SBI05473_Mitochondrial membrane protein SHH3
MKATIQRVTSVFGVPRASVFVPRISTPFILHNYISNGRMVLFSKEFHNGRVSKSDLWSSNKEEELLVSQRKKRPISPHLTVYEPEMSWYLSSLHRISGVLLALGFYAFTITLGVTTIMGMDTTFQDLNKWYHEKMPKWSQWVAKGSAAYLFAFHFGNGIRHLIWDMGYELTNRGVIKTGSIVLAGTLVLGTYLLAQ

SEQ ID NO: 1488 - protein, 282 aa, Saccharomyces cerevisiae
  source 1..282: note = SBI05473_Fatty aldehyde dehydrogenase
MSNDGSKILNYTPVSKIDEIVEISRNFFFEKQLKLSHENNPRKKDLEFRQLQLKKLYYAVKDHEEELIDAMYKDFHRNKIESVLNETTKLMNDILHLIEILPKLIKPRRVSDSSPPFMFGKTIVEKISRGSVLIIAPFNFPLLLAFAPLAAALAAGNTIVLKPSELTPHTAVVMENLLTTAGFPDGLIQVVQGAIDETTRLLDCGKFDLIFYTGSPRVGSIVAEKAAKSLTPCVLELGGKSPTFITENFKASNIKIALKRIFFWCFRKFWPDLCFTRLFVST

SEQ ID NO: 1489 - protein, 220 aa, Saccharomyces cerevisiae
  source 1..220: note = SBI05473_Fatty aldehyde dehydrogenase
MIHEPAYKKAVASINSTNGSKIVPSKISINSDTEDLCLVPPTIVYNIGWDDPLMKQENFAPVLPIIEYEDLDETINKIIEEHDTPLVQYIFSDSQTEINRILTRLRSGDCVVGDTVIHVGITDAPFGGIGTSGYGNYGGYYGFNTFSHERTIFKQPYWNDFTLFMRYPPNSAQKEKLVRFAMERKPWFDRNGNNKWGLRQYFSLSAAVILISTIYAHCSS

SEQ ID NO: 1490 - protein, 375 aa, Saccharomyces cerevisiae
  source 1..375: note = SBI05473_Alcohol dehydrogenase
MLRTSTLFTRRVQPSLFSRNILRLQSTAAIPKTQKGVIFYENKGKLHYKDIPVPEPKPNEILINVKYSGVCHTDLHAWHGDWPLPVKLPLVGGHEGAGVVVKLGSNVKGWKVGDLAGIKWLNGSCMTCEFCESGHESNCPDADLSGYTHDGSFQQYATADAVQAAKIQQGTDLAEVAPILCAGVTVYKALKEADLKAGDWVAISGAAGGLGSLAVQYATAMGYRVLGIDAGEEKEKLFKKLGGEVFIDFTKTKNMVSDIQEATKGGPHGVINVSVSEAAISLSTEYVRPCGTVVLVGLPANAYVKSEVFSHVVKSINIKGSYVGNRADTREALDFFSRGLIKSPIKIVGLSELPKVYDLMEKGKILGRYVVDTSK

SEQ ID NO: 1491 - protein, 520 aa, Saccharomyces cerevisiae; identical to SEQ ID NO: 1115
  source 1..520: note = SBI05473_Aldehyde dehydrogenase 5

SEQ ID NO: 1492 - protein, 319 aa, Pichia terricola
  source 1..319: note = SBS00208_Succinate--CoA ligase subunit alpha
MFRRAFHTSRASRNYADTIKNLKVNKDTKVIFQGFTGRQATFHAEQALAYGTQIVGGTNPKKAGEIHLGKPVFATVAEAMKETGATASGVFVPPPIAAAAVQEAIEAEIPLVVCITEGIPQQDMLRISQMLKTQSKTRMVGPNCPGIIAPEQCKIGIMPQSIHKRGKIGIVSRSGTLTYEAVAQTTQVGLGQSLVIGMGGDPSPGTNFIDALSLFLDDAETEGIIMIGEIGGSAEEEAAEFLKQYNLTREVPKPVVSFIAGVTAPPGRRMGHAGALISGGKGTAQSKIEALNAASVEVVPSPGRLGAALYQQFVDRKLL

SEQ ID NO: 1493 - protein, 334 aa, Pichia terricola
  source 1..334: note = SBS00208_Malate dehydrogenase
MFSRVSSRQFSSTAQSAYKVTVLGAAGGIGQPLSLLMKLNHQVTKLSLYDLRLGKGVATDLSHIPTNSTVEGYGPENDGLAKALKDSDVVLIPAGVPRKPGMTRDDLFNTNASIVRDLAKAAADHCPNAALLIISNPVNSTVPIVSEVLKSKGVYNPKKLFGVTTLDVLRASRFLSEVANTNPTTETVTVVGGHSGVTIVPLLSQTKHKDLPKDTYDALVHRIQFGGDEVVQAKDGAGSATLSMAQAGARMAGSVLKGLSGEVDITEPTFVDSPLFKSEGVEFFSSRVTLGPQGVKEIHPLGSLSSAEEEMVQIAKETLVKNIQKGVDFVKANP

SEQ ID NO: 1494 - protein, 558 aa, Pichia terricola
  source 1..558: note = SBS00208_Pyruvate decarboxylase isozyme
MTTSNDTIPLARYLFEKIREVGVHSIFGVPGDFNLVLLDYIKEIEGLRWVGNANELNAGYETDGYSRTNGFGCLITTFGVGELSAVNAVAGAYAEHVPLIHIVGMPSVSAEQQKLLLHHTLGNQRFDDFTIMSQQISIKLEVLKDLSSAPAIINDLIETAYITKRPVYLGIPSNFFTGQVPKSLLDNKLKLTLPPNDEETENEFVSNVLQLIENSERPIVLVDACASAHQVIQEVKQIAKLPNIPVFTTPMGKGTVNEDADEYYGIYVGALSAPDVKEYVESSDCVLSIGGLLSDFQHWFIFIFLFYQECYLQMKGALQNLIGKLSTLKKKFPSLEAPKSKFDYKTAEVTPKGQLTLDYLWKRLSYFLHEGDVVVTETGTSNFGVLATKFPKDTRKINQVLYGSIGYSLPAAVGAQFAIDDSQKFANKDKDTRVVLFIGDGSLQLTVQAISDVCRWNLSPYIFVVNNGGYTIEKLIHGPTEDYNQIQTWDHQLLLKLFADKVDYESLTVSSCEELNSLFKDAEFNKPSKIRLIELMVDEMDAPESLVKQAKLSEQCNE

SEQ ID NO: 1495 - protein, 327 aa, Pichia terricola
  source 1..327: note = SBS00208_Malate dehydrogenase
MVKVTVCGAAGGIGQPLSLLLKLNPKIDELALFDVVNVPGVGTDLSHICSNSTTTSHLPSAKEDKTALADSLKNSDLVIIPAGVPRKPGMTRDDLFNINASIVQGLAQGIAESCPDAFVLIISNPVNSTVPIVAETLKKNNVFNPKKLFGVTTLDIVRANTFISQLYPKETKPTDFNINVIGGHSGETIVPLYSLGNSKQYLDKLSEEQQKELIHRVQFGGDEVVQAKNGAGSATLSMAYAGYKLAESILKAFDTPNIVECTFLNLDSSIKETSEAKKLVVKLGKSGIEEVQYEILDKISANEKKLLEVAVDQLSKNIEKGVSFVKK

SEQ ID NO: 1496 - protein, 608 aa, Pichia terricola
  source 1..608: note = SBS00208_Probable succinate dehydrogenase flavoprotein
MLSQLFKQHNPIIKSSLTLSRRLQSTTAADISKKYNIIDHEYDSIVIGGGGAGLRAAFGLSEAGFKTACISKVFVTRSHTVAAQGGINAALGNAHKDNWKHHMYDTVKGSDWLGDQDAIHYMTKNAPAAIYELEHYGVPFSRFPNGKIYQRAFGGQTKDYGKGGQALQNLCSTKHDTDFFIEYFVLDLLKLNGEVVGCIAYNQEDGTIHRFRAHNTVVATGGYGRVYASCTSAHTCTGDGGAMVSRAGFPLQDLEFVQFHPTGIYGSGCLITEGARGEGGYLVNSEGERFMERYAPSAKDLACRDVVARAITQEIAEGRGVGPKKDHMYLQLSHLPKDVLAERLPGISETIKIFSGIDITEKPAEIQPTVHYNMGLIPTNYHGQALTVDEAGKDQFIKGLYACGEAACASVHGANRLGANSLLDLVIFGRAVAHHIRDTTKPGEAHKPAPADLGFESLLNFEKLRTAKEHMQDVMQKHVSVFRTEPLLQEGVNQMKEVSKTFKDVKVEDDSLIWNSDLVETLELQNLLTLANQTAVSALTRKESRGAHVIVDPVTKEQVPRDDVNWLKHSLSYQKDITDDVEMKFRSVVMTTLDETECPPVPPAVRAY

SEQ ID NO: 1497 - protein, 252 aa, Pichia terricola
  source 1..252: note = SBS00208_Succinate dehydrogenase iron-sulfur subunit
MSSVITKRITQITQLNSILVSKRFQSVAAPANLKTFKIYRWNPDTPEVKPKMQEYKVDMNNCGDGTLTFRRSCREGICGSCAMNIDGRNTLACLCKIDSEKASSIKIYPLPHTHVVKDLVPDLTQFYKQYKSIQPYLQRKEFPKDGTEILQTVEDRKKLDGLYECILCACCSTSCPSYWWNAEEYLGPAVLMQSYRWMIDSRDEAKEKRKEMLQNSMSVYRCHTILNCTKTCPKGLNPGKAIAEIKKFLASA

SEQ ID NO: 1498 - protein, 319 aa, Pichia terricola; identical to SEQ ID NO: 1492
  source 1..319: note = SBS00208_Succinate--CoA ligase subunit alpha

SEQ ID NO: 1499 - protein, 297 aa, Pichia terricola
  source 1..297: note = SBS00208_Alcohol dehydrogenase
MADEILINIKYSGVCHTDLHAWKGDWPLPVKFDPYCVGGHEGAGVVVAIGDNVKGWNLGDYAGIKWLNGSCMNCEECELSNESNCPEADLSGYTHNGSFQEYATGPAVQAAHIPKPEEGSEWYGKDDEYLAEVAPILRAGITALQGLKVNGLLSPGAAGGLGSLAVQYAKAMGLRVKKIYSRKCGGEIFVDFTKEKDVPAAINKATNGGAHGVISVSAAEAAASQSTQYVRTNGTIVLVGLPANAYCKSNVFEQVTSFERGLVRSPIKIVGLSELPRVFEEMAAGKILGRYVVDTTH

SEQ ID NO: 1500 - protein, 411 aa, Pichia terricola
  source 1..411: note = SBS00208_Isocitrate dehydrogenase
MAFEKIKVKTPVVEMDGDEMTRIIWKMIKDQLILPFLDIDLDYYDLGIEYRDETNDQVTVDSANATKKYGVAIKCATITPDEARVEEFGLKKMWLSPNGTIRNILGGTVFREPIIIENIPRIVEHWEKPIVIGRHAFGDQYKCQNIVTPECGGELKLVFTPKDGSAPIEVPVYNFDGKGCALGMYNTEESIIGFAKASFELAISRKLPLYMSTKNTILKQYDGLFKDTFEKMYQESYKAKFEELGIWYEHRLIDDMVAQMVKSKGGYIIAMKNYDGDVESDIVAQGFGSLGLMTSVLVSADGKSFEAEAAHGTVTRHYRQHQQGKETSTNSIASIFAWSRGLLKRGELDETPDVVKFAEILEKATIETVKVDGIMTKDLALARGETDRSSYVTTGEFIEAVAKRLTNELGA

SEQ ID NO: 1501 - protein, 619 aa, Pichia terricola
  source 1..619: note = SBS00208_Acetyl-coenzyme A synthetase
MTQQHSVVHEANTSLLRAIPEEFFAKQPRKGHVESLEQYHELYKKSIEDPQGFFGPLAKELLHGTVSSPMSSRDLLHHGDAAWLLNGQLNASYNCVDRHALATPDKIAIMYEADEEKDSYTLTYAELLREISKVAGVLTSWGIKKGDTVAIYLPMNPQAIIAMLAVARIGAIHSVIFAGFSLGSIKDRVNDAACKALLTCDEGRRGGRPVNIKKLCDDALEQCPTVEKVLVFKRTGADVAMKKGRDFYWDEETANFPGYTPPVPVNSEDPLFLLYTSGPRALQRTSCSPPETWVWITGHTYALYGPLALGVYHNCVRRHPSVPTITADYGTLSTSTRLTHFYVAPTALRLLRKAGEEELAKYDLSTLRTLGSSAVESVTLPIPTGRPRAVLTLLPHLLESPATSPAPPRSPSSACKPVLSTRFLAREITGNDVEGVLAIKDTWPSMARSVWKNHTKYMDTYLRPYPSYYFTGDGAARDHDGYYWIRGRVDDVVNVSGHRLSTAEIEAALIEHHGVSEAAVVGINDDLTGQAVVAGASNGDELRKALVLQVRKEIGPFAAPKSVIIVADLPKTRSGKIMRRILRKISSNEADQLGDITTLANPQSVEGIIEEFSLQFGKK

SEQ ID NO: 1502 - protein, 166 aa, Pichia terricola
  source 1..166: note = SBS00208_Succinate dehydrogenase assembly factor 2
MLSAQHLTRRGFSSFRSLLIAKPVPDTTPIDKTTSPQGKIQGKPVKNYYIDENNEVVIRVQPLNRTGESLEGLRKRLIYQSRKRGILETDLLLSRFANKYLDKFDREMLEEYDKLLDELDWDIYYWATENFEITPLPDKWKDSKILKLIQEESKNKEKEILRMPNL

SEQ ID NO: 1503 - protein, 343 aa, Pichia terricola
  source 1..343: note = SBS00208_Alcohol dehydrogenase
MEATFEIPESQYGCIFYEKGGDIEYKQIPVPKPKSNEILVKVLYSGVCHSDLHAWKGDWPSPTKLPLVGGHEGAGIVVAKGQNVTSFKVGDYAGIKWINSSCMNCEFCEQGAETACTNLDISGYTRDGTFQQYATADAQQAAHISKDVDLAGVAPVLCAGITAYKALKTANLNAGQWVAISGAGGGLGTMAIQYAKAMGLRVLAIDCGNDKEKLCKSLGAEIFVDFEKSVDIVKDIVKATDGGPHGVINVSVSEKAVSQSCKYVRIMGKVILVGLPANAQLITPIFDAVVKAIEIKGTSVGTRKDTAEALGFYNRGLITAPIKILGSMSEGSIAGRIVLDTSK

SEQ ID NO: 1504 - protein, 525 aa, Pichia terricola
  source 1..525: note = SBS00208_Pyruvate decarboxylase isozyme
MDGQISTPFFSGSTKNKIRYVFERIKQVGVNTIFGLPGDFNLSLLDKIYEVEGLRWAASLNELNAAYAADGYSRIKGLGVIITTFGVGELSALNGIAGAYAEHVGVLHIVGVPSLASQAKQLLLHHTLGNGDFDVFHRMSANISETTAMITDLAAAPAEIDRCIRTAYIAQRPVYLGLPANLVDLTVPAKLLDTKIDLALKANDAEAEDEVVETILSLIADAKNPVILSDACASRHNVKNEVKQLIDATQFPAFVTPLGKGSIDEKHPRFGGVYVGTLSSPEVKQSVESADLVLSVGALLSDFNTGSFSYSYQTKNIVEFHSDYIKIKNASFPGVQMKFVGAKIANYSPVPVPAGLPKNAPVADSTPLAQEWLWNELGEFLEEGDIVVTETGTSAFGINQTRFPTDAYGISQVLWGSIGYSVGAMVGATFAAEELDKAKRVILFVGDGSLQLTVQEIACLIRWGLKPYIFVLNNNGYTIEKLIHDILPTFGATDYEAIPVKTKWMLHPLLVAQANLTAAINAKQD

SEQ ID NO: 1505 - protein, 673 aa, Pichia terricola
  source 1..673: note = SBS00208_Acetyl-coenzyme A synthetase
MTATHAVVHEANGVTARPTPQPFFEKQPNPSLSAKEHYEELYKQSIEDPETFFGSMAKKFLSWDKDFNKVKSGNLENGDVAWFLNGELNASYNCVDRHAFANPDKVALIFEADDESESRSITYGELLSEVSKVAGVLKSWNVQKGDTVAIYLPMTPEAIIAMLACARIGAVHSVIFAGFSAGSIKERVTDANSKVLITVDEGKRGGKTINNKKIVDEALNECPSIEKVLVYKRTGNEKIFMKEGRDFYWQDLAVDFRGYIPPVSVNSEDPLFMLYTSGSTGAPKGVVHCTGGYLLGAAMTTKYVFDIQPEDVLFTAGDVGWITGHSYALYGPLTLGCTSIIFEGTPAYPDFGRFWKIIERNKATHFYVAPTALRMLKKSGEDEISKYDLSSLRTLGSVGEPIASEIWQWYDEKIGHGCCHISDTYWQTESGSHLIAPLAGAVPTKPGAATLPFFGIDAVIIDPTTGKVLEGNDVEGVLAVKSAWPSMARTVYKNHKRYMETYLKPYPGFYFTGDGAGRDHDGYYWIRGRVDDVVNVSGHRLSTAEIEAVLLEDATRVSDAAVVGINDDITGQAVIAYVQLKDNSLFSNDEELLKLRQNLRMSIRATIGPFAAPKTIIIVDDLPKTRSGKIVRRVLRKIVSGEAKGLGDQSTLANPECIPQIIDATEKQFGVKN

SEQ ID NO: 1506 - protein, 651 aa, Pichia terricola
  source 1..651: note = SBS00208_Acetyl-coenzyme A synthetase
MPETHLENEHLMHEEALPVPDGFFERHPSKPHLTSLDQYHKMYKESIENPADFFGQMAKENLDWFKPFKTTKIPLAPHLVQNNGEPSSWFTDGELNACYNCVDRWAIKNPNKTAIIYEADEVNQGRVITYGELLKDICKFAQVLKSLGVKKGDSVAVYLPMIPEAIVALMAIIRIGAIHSVVFAGFSSTSLKDRVLDANSKIVITTDESKRGGKIIETKKIVDAALTHCPDVRNVIVFKRTGNSHIPWNSKRDLWWHEEVNKFGPYCPPESMNSEDPLFLLYTSGSTGKPKGILHTTAGYLLGSMLTTKYVFDVHEEDIIFTAGDVGWITGHSYVVYGPLLNGATTVVFEGTPAYPNFSRYWEIVDQYGVNQFYVAPTALRLLKRAGEKYIEKYKLDTLRVLGSVGEPIAKDVWEWYNKYIGRGKAHICDTYWQTESGSHLIAPLAGVTPTKPGSASFPFFGIEPMIVDPVSGEELKGNPVEGVLCVKTCWPSMTRSIWNDYNRYLDTYLKPYHGHYFSGDGAARDKDGFYWILGRVDDVVNVSGHRLSTAEIEAALIEHPLVSENAVVGFLDELTGRRRCRICFVKKLAHLLLQKLILIVEDLPKTRSGKIMRRILRKILAGEEDQLGDISTLSNPDAVANLIDVAKSHR

SEQ ID NO: 1507 - protein, 512 aa, Pichia terricola
  source 1..512: note = SBS00208_Aldehyde dehydrogenase 5
MLRTATRTTFKSAQPSFMAAAAALRYYSHYPLSKSITLPNGKVYEQPTGLFINGEFVASQQHKTFEVINPSNEDEICHVYEARTEDVDAAVDAAYNAFHSEWSKMDPSIRGEHLMKLAELMEKNKDTLAAIESMDNGKALFMAEIDVKLVINYLKYCAGWADKLFGKLVDTGSNYFNYIKREPIGVCGQIIPWNFPLLMWSWKVGPALAAGNTIVLKTAESTPLSALYAAKLAKEAGIPDGVINIVSGFGKITAFTGSTATGKHIMKAAAESNLKKVTLELGGKSPNIVFNDADIKKAVNNLILGIFFNSGEVCCAGSRVFIQEGVYDQVLEEFKIAAEALKVGNPFEEGVFQGAQTSQQQLTKILGYVESGKDEGATLVTGGERLGDKGYFVKPTIFADVKPNMKIYSEEIFGPFAVVTKFKTADEAIAMANDSEYGLAAGIHTTSLDTATYVANNLEAGTVWINTYNDFHHNMPFGGFKQSGIGREMGEAAFENYTQWKTVRIAINDGPQ

SEQ ID NO: 1508 - protein, 558 aa, Pichia terricola
  source 1..558: note = SBS00208_Malate synthase
MPAAQLYVTSLADVKVLGEVSDKPLLSECTPRDILTVDALKFIVLLHKTFNGRRKELLANRQKVQTELDNGGSLHYLKETEFIRNDPNWKCSPTHPKLMSRKVEITGPPDAKMIINAFNTDVHTYMTDFEDSCAPTWSNMIYGQVNLFDAIRDKIDFTNEKTGKRYKINREGRRVPVMIVRPRGWHMIDSHITINDEPISASIMDFGLFFYHNAKYLVSQGLGPFFYLPKMEHWQEAKLWNDIFCVAQDCLEIPRGTIKATVLIETLPISYQLDEVLYALRDHSSGLNCGRWDYMFSTIKRLRNKKEHVLPDRQQVTMSVPFMTNYVKQLIKICHKRGVHAMGGMAAFIPIKDDLEANKVALEAVRKDKLREVLAGHDGTWIAHPGLLETARSVFEEHMPTPNQLFIEKPDVNISENMLVDTNIEGGEITMKGLNANIYIGLNYMESWLRGLGCVPINHLMEDAATAEVSRLQLWSWCKHAVKMNDSGKTITPEFVCSLIDEEVSKSSFKEGNKYEIAAQALKDELTGKKPIAEFLTDILYPYIATPGKPIDLDTLKQ

SEQ ID NO: 1509 - protein, 365 aa, Pichia terricola
  source 1..365: note = SBS00208_Alcohol dehydrogenase
MLSKSFSALKYASKPNTRFTLSLRGMATAGSIPKTQKGVIFYENGGPLEYKDIPVPTPKPNEILINVKYSGVCHTDLHAWKGDWPLATKLPLVGGHEGAGVVVAKGENVTNFEIGDLAGIKWLNGSCMGCEFCQQGAEPNCPQADLSGYTHDGSFQQYATADAVQAAKIPQGSDLANVAPILCAGITVYKALKTAELRPGQWVAISGAAGGLGSLAVQYAKAMGLRVLGIDGGAEKGEFVKSLGGEVYIDFTKSKDVVQDIIDATNGGPHGVINVSVSPAAISQSCQYVRTLGKVVLVGLPANAICESPVFEHVIKSIQIRGSYVGNREDTTEALDFFSRGLVKSPIKVMEQGKILGRYVVDTSY

SEQ ID NO: 1510 - protein, 373 aa, Pichia terricola
  source 1..373: note = SBS00208_Alcohol dehydrogenase
MFTSTFRRAAVRAARFQSTFTIPEKQMGVIFETHGGPLEYKEIPVPQPKANEILINVKYSGVCHTDLHAWKGDWPLPAKLPLVGGHEGAGVVVAKGSAVTNFEIGDLAGIKWLNGSCNSCEFCEQGDEPNCAKADLSGYTHDGSFQQYATADAIQAAKIPQGSDLAQIAPILCAGVTVYKALKTADLKAGQWVAISGASGGLGSLAVQYAKAMGLRVLGIDGGEGKEGLFKSCGGDVFIDFTKYSKDQAAKMVDDIKAATNGLGPHGAINVSVSEAAISQSCDYVRSTGKVVLVGMPSGAVCKSDVFQHVVKSLQIKGSYVGNRADTREALDFFQDGKVRSPIKIVGLSKLPEIYELMEQGKILGRYVVDTSK

SEQ ID NO: 1511 - protein, 602 aa, Pichia terricola
  source 1..602: note = SBS00208_NAD-dependent malic enzyme
MTQDQCIKKTPVGEAAKVSVPQHTRLSATGPIECPLSGQQLLNAPLFNKGTAFTVEEREAFGLQGLLPPVVNTLDEQVQRAYRQLHYLKTLLAKNDFCTSMRLQNKVLYYKLVKEHIRELISIVYTPTEGDAIIAYSDRFRKPEGCFLDISKPDEIDVRLAPFGTDKDIDYIVISDSEGILGIGDQGVGGVRITIAKAALMTLCGGLHPGRVISCVLDVGTNNKKLLDDELYLGNKFPRVRGQEYDDFVHKAITAMQKRFPNAVIHFEDFGVTTARPVLTRYRNVVPCFNDDIQGTGAVVMASMTAALQLTNRDLLDSEILIYGAGSAGLGIADQIVNHMIIHGATKEQARAKIHCMDRYGLIMKGMDTNSPAQEQYADEPSNWEGVDTKSLVEVIEKVKPTCLVGCSTQAGAFNEQVIKTMYKHNPRPMIFPLSNPTRLHECFPEDALKWTDFNALVATGSPFPPVDGHVISENNNCFTFPGIGLGAVLSRATTISDAMISAAVDELASLSPAQKNPKAGLLPPIEQIDETSARVATALILQAIKEGHARIEEEESPLGGKVKVPREFEECLAWVKEQMWRPEYRPLIKVEHCDAIHTHQY

SEQ ID NO: 1512 - protein, 354 aa, Pichia terricola
  source 1..354: note = SBS00208_Alcohol dehydrogenase
MSSSTTFEIPETQMGCIFYENNGPIEYKEIPVPKPKPTEILIKVLYSGVCHTDLHAWHGDWPLATKLPLVGGHEGAGIVVAKGENVTSFEIGDYAGIKWLNGSCMGCEFCEQGAEPNCEKADLSGYTHDGSFQQYATADAIQAAHIPKDADMAGVAPILCAGVTVYKALKTADLKAGQWVAISGAAGGLGSLAIQYAKAMGLRVLAIDGGDEKEVLCKSLGAEVFVDFTKSKDVVADIIKATNGGAHGVINVSVSEAAISQSCKYARILGKVVLVGLPAGAQVKTPVFDAVVKSIEIKGSYVGNRQDTAEALDFYNRGLVKSPFQIVGLSELPNVFKLMSEGKILGRMVLDTSK

SEQ ID NO: 1513 - protein, 640 aa, Pichia terricola
  source 1..640: note = SBS00208_Probable succinate dehydrogenase flavoprotein
MLSLQRSLKTISNSKRCFSSSTKSLQVINRFNNLNGKEAASSMKKDYHIIDHEYDCVVIGAGGAGLRAAFGLVKEGFKVACISKLFPTRSHTVAAQGGINAALGNMHKDDWHWHMYDTVKGSDWLGDQDAIHYMTREAPPSIIELEHYGLPFSRNNEGKIYQRAFGGQTKDYGKGGQAYRTCAVADRTGHALLHTLYGQSLRYDTHYFIEFFAMDLLKHNNEIVGCIAYNQEDGTLHRFKAHKTIIATGGSGRAYFSCTSAHTCTGDGTAMVSRAGYPLEDMEFIQFHPSGIYGSGCLITEGARGEGGYLINSEGERFMERYAPHAKDLACRDVVSRAITMEINAGRGVGPEKDHMHLQLSHLPASVLQERLPGISETAKIFAGVDVTKEPIPILPTVHYNMGGIPTKWSGEALTINEKGEDEVIPGLYACGEAACASVHGANRLGANSLLDLVVFGRAVAHTIASEMKPGMPHKELPADIGFESIANLDKLRNADGNTTTADLRLEMQKAMQKHVAVFRTQENLDAGVSELEKIDAKFADIKTTDRSMIWNTDLTETLELQNLLTCARQIANSAAARKESRGAHARDDFQERDDVNWQKHTLSWQVKTGDEVKLGYRDVIKTTLDENECKPVPPTVRAY

SEQ ID NO: 1514 - protein, 423 aa, Pichia terricola
  source 1..423: note = SBS00208_Isocitrate dehydrogenase
MFSATARANARLATINRQFSTSAIQFGKIKVKNPIVELDGDEMTRIIWADIKSKLILPHLDVDLKYYDLSIQSRDATDDKITVEAGNAIKKYGVGVKCATITPDEARVKEFGLKKMWLSPNGTIRNILNGTVFREPIVIGADKGPNDIEIPRLVPGWKKPIIIGRHAHADQYKATDFVVPEAGTLQVTFTPKNPTGEKIERKIYEFGGPGVALSMYNTEESVRGFAHSSFKMALARNVPLFLSTKNTILKKYDGKFKDIFQEIFESTYKAEFEKKGLFYEHRLIDDMVAQMIKSEGGFALALKNYDGDVQSDIVAQGFGSLGLMTSVLITPDGKSFESEAAHGTVTRHYRRYQKGEKTSTNPIASIFAWTRALAQRGKLDNTPEVVEFANTLEKMCFGYLNKKEYADTEGFLDAVSSRLNKTL

SEQ ID NO: 1515 - protein, 326 aa, Pichia terricola
  source 1..326: note = SBS00208_Alcohol dehydrogenase
MGIPTKQKAVIFETNGGGIEPKPNELLINVKYSGVCHTDLHAWKGDWPLDTKLPLVGGHEGAGEVVAIGENVTGWEIGDFAGIKWLNGSCLSCEHCINGRESNCGQADLSGYTHDGSFQQGTNLAEVAPILCAGITVYKALKTADLQAGQWVAISGAAGGLGSLAVQYAKAMGYRVLGIDGGEGKEEFTIQAGAESFVDFTKSKDVVKDVQKLTDGGPHAVINVSVSERAMQQSLDYVRSAGTVVLVGLPAGAKVAASVFDSVVKSISIKGSYVGNRADTAEAIDFFARGKVKCSIKLAGLSELPKIYKLMEEGKILGRYVVDTSK

SEQ ID NO: 1516 - protein, 414 aa, Pichia terricola
  source 1..414: note = SBS00208_Succinate--CoA ligase subunit beta
MFSKSLAKAVSQATRQQVRKLSIHEYRSAALLKSYGIGVPRGEAARTPEEAYKAAKDLNTNEMVLKAQALTGGRGKGHFDNGLKSGVRLIETPEEARDLAEKMLNHKLITKQTGEAGKIVTAVYVVERKYALQEAYLSIVMDRKNQSTMIIASSEGGMDIEGVAKTNPDAIKKYPVDIESGVSDSLAKEIASVLGFTDGAQPEAAKTIQTLYKIFKEKDATQVEINPLTETTENQVMCMDAKFNFDDNASYRQEEVFSWRDPTQEDADEVTASKYGLNFIKLDGNIGCLVNGAGLAMATMDVVKLYGGAPANFLDVGGTATPQTIEKAFELILTEKKVSAIFVNIFGGIVRCDFVADGLIQATKNLGLTIPVVVRLQGTNFAIAKKMIDESGLKLYPEEDLDKAAKKVVELGTK

SEQ ID NO: 1517 - protein, 346 aa, Debaryomyces hansenii
  source 1..346: note = SBS00319_Alcohol dehydrogenase
MSIPKTQKAVIFETSGGELKYTDIPVPKPKSNEILINVKYSGVCHTDLHAWKGDWPLPTKLPLVGGHEGAGEVVAIGENVQGWEIGDLAGIKWINGTCLNCEFCQNSFESNCAKADLSGYTHDGSFQQYATADAVQAARIPKGTDLANVAPILCAGITVYKALKTSGAKPGQWVAVSGAAGGLGSLAIQYAKAMGLRVLAIDGGDKEEFVKSLGAESYIDFTKSKDVVKEVQETTDGGPHGVINVSVSIKAINQSTEYVRSCGTVVLVGLPHANLETSLFNAVIKCVSIKGSYVGNRADSAEAIEFFSRGLIKCPIKVVGLSELANIYKLMEEGKILGRYVVDTSK

SEQ ID NO: 1518 - protein, 537 aa, Debaryomyces hansenii
  source 1..537: note = SBS00319_Potassium-activated aldehyde dehydrogenase
MLSTSKISKNLFQRRIVSGLSPHRNTLGYFQSSRFYSSLPLEVPITLPNGIKYTQPTGLFINNEFVSSKQGNTFEVLSPSTEEVVASVYESRHDDVDIAVQHALRAFEESSWTKADPSQRGAALYKLADLIEENFETIASIETMDNGKSIGNAKGDVALAISVLRSTAGFSDKILGSVIETGDSHFNFTRREPLGVCGQIIPWNFPLLMFTWKIAPALVAGNCVVLKSSETTPLSALYVCNLIKEADILPPGVLNVLSGFGKHTGNAITEHPLIKKVAFTGSTATGKTIMKKCAESNLKKVTLELGGKSPHIIFNDADLETALKSVVAGIFYNSGEVCCAGSRLYVQEDIYDTFVEKFVQFANSEVKVGNPFLPETIQGAQNSVNQLEKILKYIQIGTDEGAKLLAGGERLQEKGYFIKPTIFGDVKEDMRIVQEEIFGPVITITKFKTTDDVVRMANNTEYGLAAGIQTSNSSRAIDVSRRLKAGTIWVNTYNDFHPMVPFGGYNQSGIGREMGEEVLHNYTQTKAVRMGIIKPSD

SEQ ID NO: 1519 - protein, 410 aa, Debaryomyces hansenii
  source 1..410: note = SBS00319_Isocitrate dehydrogenase
MGFNKIKVDQPIVEMDGDEMTRIIWKFIKDKLIFPYLDVDLKYYDLGIEYRDQTDDKVTTDAAEAILKYQVGVKCATITPDEARVEEFKLKKMWLSPNGTLRNILGGTVFREPIVIDNIPRIVPQWENPIIIGRHAFGDQYKATDIVIPKAGQLELVFKPTDGSPAEVYPVYNYDAPGVALSMYNTDKSITDFAESSFKMALDRKLILFSSTKNTILKKYDGRFKDIFEELYEKKYKKQFEDAGIWYEHRLIDDMVAQMLKSKGGYIIAMKNYDGDVQSDIVAQGFGSLGLMTSVLMTPDGKAFEAEAAHGTVTRHYRQHQQGKETSTNSIASIFAWTRGIIQRGKLDKNDDVVKFGENLEKATIDTVALDNIMTKDLALAQGKTERSSYVTTEEFIDAVAARLNKNLGV

SEQ ID NO: 1520 - protein, 142 aa, Debaryomyces hansenii
  source 1..142: note = SBS00319_Succinate dehydrogenase assembly factor 2
MFKNIQKRNISSGVRSFLNHGKPQNPVYNAELTMKIEPIQRTGESIDVKRARLVYQSRKRGILESDLLLSRFAKKYLSQFSEEELDEYDKLLDEPDWDIYYWATRNYDVTPLPDKWKDSKILMLLQEDAKNKEKVILRMPEL

SEQ ID NO: 1521 - protein, 551 aa, Debaryomyces hansenii
  source 1..551: note = SBS00319_Malate synthase
MSSPFPKTADKLKGVEILASIPDRAKHILNAEALALVATLHRAFQPTRKKLLANRKEQQAKRDRGELPDFLPETEHIRNDPTWTGPPLAKGLEDRRVEITGPVDRKMVINALNSPVATYMADFEDSLTPAWANLIDGQVNLYDGVRKNISFEQNGKKYALNTDPKRHLPTLIVRPRGWHLDEKHVLVDGEPVSGGIFDFAIYFYNNAKETLAQGFGPYFYLPKMEHHLEAKLWNDIFNHAQDYIGMTRGTIRGSVLIETLPAAFQMDEIIYQLRQHIGGLNCGRWDYIFSYIKSLRNHPEFILPDRSQVTMSAPFMSSYVKLLVNTCHKRQVHALGGMAAQIPIKEDKQRNQAALENVAKDKLREVNAGCDSCWVAHPALVPVVLKVFNEHMKGPNQINVPPKVPYTPVTARDLLSPYVPGAKITEQGIRTNIIIGLSYIEAWLRNIGCVPINYLMEDAATAEVSRTQIWQWVTHGCKTDEGKTINKEYVGKLLKEESDKLSKNGKPGNKFSQALTYFKPECLAEKYSDFVTTLIYDDVTTIGRPTAAEKL

SEQ ID NO: 1522 - protein, 437 aa, Debaryomyces hansenii
  source 1..437: note = SBS00319_Isocitrate dehydrogenase
MFRSGVMRNPAMGGFGKFSMRSFSSSLNNLDKIKVKNPIVELDGDEMTRIIWQRIKDKLINPYLDVDLKYYDLGIESRDKTDDQITIDAANAIKEYGVGVKCATITPDESRVEEFKLKKMWLSPNGTIRNILGGTVFREAIIIPRIPRLVPGWKEPIVIGRHAHGDQYKATDLVINEPGKLEMIFTPENGGAPETRTVYDYKGPGVGLAMYNTDESIIGFAHSSFKMALTKKLPLYLSTKNTILKKYDGRFKDIFQEIYESTYKKEFEANNIWYEHRLIDDMVAQMIKSKGGFVMALKNYDGDVQSDIVAQGFGSLGLMTSVLMTPDGKAFESEAAHGTVTRHFRQHQQGKETSTNSIASIFAWTRGIAQRGRLDNTPDVVKFAETVEKATLDTVQEDGIMTKDLALALGKTDRDSYVTTTEFLDAVSDKLQKQIQV

SEQ ID NO: 1523 - protein, 627 aa, Debaryomyces hansenii
  source 1..627: note = SBS00319_Probable succinate dehydrogenase flavoprotein
MLRRYFGTSAARLQTIGNIKGSQLNATKYLQKDYHVIDHQYDCLVVGAGGAGLRAAYGLSDAGFKTACISKLFPTRSHTVAAQGGINAALGNMHKDDWHWHMYDTVKGSDWLGDQDAIHYMTKEAPDSIYELENYGVPFSRNEEGRIYQRAFGGQSKEFGKGGQAYRTCAVADRTGHALLHTLYGQSLRNDTHFFIEFFAMDLMMEDGKCIGVIAYNQEDGTIHRFQAHKTVIATGGYGRTYFSCTSAHTCTGDGFAMVSRAGLPLEDMEFVQFHPSGIYGSGCLITEGARGEGGFLLNSEGERFMERYAPHAKDLASRDVVSRAMTMEINEGRGVGKEKDHIYLQLSHLPPSVLKERLPGISETAHIFAGVDVTKEPIPILPTVHYNMGGIPTNYKAEVLKKGPDGKDEIVEGLYACGEAACASVHGANRLGANSLLDLVVFGRAVAHTITDQLTPGTPFKPLDEHMGKESIENLDHLRTANGDKTTAAIRGEMQKTMQRGCAVFRTQDLLDQCVENIDKIDKSFEDIKTTDRSMIWNSDLVETMELQNLLTCATQTAYSAAARKESRGAHARDDYPNRDDENWRKHTLSYQTNFGDQVKLDYRDVVKTTLDENDCKPVPPAVRVY

SEQ ID NO: 1524 - protein, 643 aa, Debaryomyces hansenii
  source 1..643: note = SBS00319_Probable succinate dehydrogenase flavoprotein
MLSLRRSALAATKFSNNKRFFTSSCVKLQTIGDNIKGNDLNTAKYMGQKYHVIDHEYDCVVVGAGGAGLRAAFGLAEAGFKTACISKLFPTRSHTVAAQGGINAALGNMHKDDWHWHMYDTVKGSDWLGDQDAIHYMTREAPDSIYELENYGVPFSRNDEGRIYQRAFGGQSKEFGKGGQAYRTCAVADRTGHALLHSLYGQALRHNTHFFIEFMAMDLLMEDGACVGVMAYNQEDGTLHRFRSHKTVMATGGYGRAYFSCTSAHTCTGDGYAMVSRAGLPLEDMEFIQFHPSGIYGSGCLITEGARGEGGFLVNSEGERFMERYAPTAKDLACRDVVSRAITMEINEGRGVGPEKDHMYLQLSHLPPSVLKERLPGISETAHIFAGVDVTKEPIPILPTVHYNMGGIPTKYNGEVLTKGPNGEDKVVPGLLACGEVACASVHGANRLGANSLLDLVVFGRAVSHTIRDTLTPGTPLSPLAADAGKESIENLDKLRNANGPKSTAQIRLEMQKTMQKGCAVFRTQETLDECVENIGKVDKTFSDVGTTDRSMIWNSDLVETLELQNLLTCATQTAASAAARKESRGAHAREDYPDRDDTNWWKHSLSYQTKFGDDVKLDYRDVIQTTLDESECKPVPPTVRAY

SEQ ID NO: 1525 - protein, 671 aa, Debaryomyces hansenii
  source 1..671: note = SBS00319_Acetyl-coenzyme A synthetase
MTPHSTHVTLDHEGILQPPAEFKERSKSKPNLADFETYSKMYKESIEDPSKFFGEQALELLSWDRPFDHARYPKSSELDFANGDIASWFVNGQLNASYNAVDRWAIKNPNKPAIIYEADEENEGRIITYGQLLKDVCKLAQCLTKLGIRKGDSVAVYLPMIPEAIVTLLAIVRIGAVHSVVFAGFSSSSLKDRILDANSKIVITTDESKRGGKTIETKKIVDDALKSCPGVTNVLLFKRTGNSHIPFTEGRDLWWHEELAKCSPYSPPVPVNSEDPLFLLYTSGSTGKPKGIQHSTAGYLLGAAMSSKYTFDVHEDDILFTAGDVGWITGHTYVVYGPLLCGATTVVFEGTPAYPNYSRYWEIVDKYKVNQFYVAPTALRLLKRAGTKYIENYKLDSLRVLGSVGEPIAAEIWHWYNDNIGRRKCHIVDTYWQTESGSHMLAPLAGITPTKPGSASLPCFGIDAKILDPVSGKELKDNDVEGVLCVKSCWPSITRGIYNDYARFIETYLKPYPNHYFSGDGAARDIDGFYWILGRVDDVVNVSGHRLSTAEIEAALILHDSVAECAVVGYADDLTGQAVAAYVSLKANVSEDLEVIKKELILTVRKEIGPFATPKTILLVDDLPKTRSGKIMRRILRKVLAGEEDQLGDISTLSNPGVVSQVIDVVKATRK

SEQ ID NO: 1526 - protein, 521 aa, Debaryomyces hansenii
  source 1..521: note = SBS00319_Aldehyde dehydrogenase 5
MFKNSIAKQARTKVAYAKSFIRMSSSLPLKVSIKLPNGTTYEQPTGMFINNEYVYPKQKKTFDVVSPSTEEHITDVYEALEEDVDSAVEAASAAFHTSWSTGDPSVRANVLLKLADLVEANADTLAHIESLDNGKSLMCSRGDVALTAMYFRSCAGWADKILGTVPETGSTHFNYTRREPIGVCGQIIPWNFPLLMLAWKLGPAAATGNTIVLKTAESTPLSGLFMTGLIKEAGFPPGVVNILTGFGKTAGNAIASHPKIKKVAFTGSTATGRHIMKAAAESNLKKVTLELGGKSPNIVFNDADVQKSVQSLITGIFYNTGEVCCAGSRIYVQEEIYDKVLEELKNASAKIKIGNPFEEDTFMGAQASSQQLDKILKYIETGKNEGAKLITGGERVEGKGYFVKPTIFGDVTESMKIVKEEIFGPVVTITKFKTIDEVVQLANDSEYGLAAGIHTENVNTAIGVANRLAAGTVWVNTYNDFHPMIPFGGYGQSGFGREMGAEALDNYTQVKAVRVGLTEKH

SEQ ID NO: 1527 - protein, 679 aa, Debaryomyces hansenii
  source 1..679: note = SBS00319_Acetyl-coenzyme A synthetase
MTSSPAHQVVHEANNIKKHETPKEFFERQPRQGHVSSLEQYQELYDKSIKDPETFFGEFGKELLHWDRDFEKVKSGSLVHGDAAWFIGGQLNACYNCVDRHAFATPNKPAIIYEADEEKDSKILTYSELLREVCQVAGVLQSWGVKKGDTVAIYMPMNSQAIISMLAVARLGAIHSVIFAGFSSGSIKDRVNDASCKALITCDEGRRGGKTINIKKLCDEALLNCPSIEKVLVYERTGNKEVTLKEGRDYWWSEETQKFAGYLPPVPVNSEDPLFLLYTSGSTGTPKGVVHSTAGYLLGAALTTKYVFDIHPEDILFTAGDVGWITGHTYALYGPLSLGVPTIVFEGTPAYPDYGRLWQIVEKHKATHFYVAPTALRLLRKSGEQEIEKYDLSSLRTLGSVGEPISPDIWEWYHEKVGKGQCHVTDTYWQTESGSHFIAPIAGVVPNKPGSASVPFFGIQTCLIDPVSGTEIQGNDVEGVLAVKDTWPSMARSVYKNHTKYMDTYLKPYPGYYFTGDGAARDHDGYYWIRGRVDDVVNVSGHRLSTAEIEAALIEHGAISEAAVVGMNDDLTGQTVVAFVALKEHLIANIKANESSEEVMKLKKEMILQVRSEIGPFAAPKAVIIVEDLPKTRSGKIMRRILRKIAAGEADQLGDITTLSNPQSVAGIIDSFGSQFGKK

SEQ ID NO: 1528 - protein, 324 aa, Debaryomyces hansenii
  source 1..324: note = SBS00319_Succinate--CoA ligase subunit alpha
MMNKQFIRGFASTNPAKNYASTIKNLKVNSDTKVIYQGFTGKQGTFHAEQAIAYGTKVVGGTNPKKAGSTHLDRPVFASVKDAVKETGASATAIFVPPSIAAGAIEEAIEAEIALAVAITEGIPQHDMIRIAQMLKTQSKTRLVGPNCPGIIAPEQCKIGIMPSHIHKRGKVGVISRSGTLTYEAVSQTTQVGLGQSLVIGMGGDPFPGTNFIDALTLFLNDPETEGIILIGEIGGTAEEEASEFLKQYNLTRPEGPKPVVSFIAGVSAPPGRRMGHAGAIVAGGKGDANSKIAALESAGVVVEKSPARLGNSLLQEFKNKGLL

SEQ ID NO: 1529 - protein, 589 aa, Debaryomyces hansenii
  source 1..589: note = SBS00319_Pyruvate decarboxylase isozyme
MTDITLGKYLFERLKQVEVSTIFGLPGDFNLTLLDKIYEVDGMRWAGNANELNAAYAADGYSRVKGLACLVTTFGVGELSAVNGVAGAYAEHVGLLHVVGVPSISSQANQLLLHHTLGNGDFTVFHRMSKNISHTTAFLSDIQSAPAEIDRCIRDAYVYQRPVYLGIPANLVDLTISSSLLEEPLNLSLKPNDAEAEEEVVESTLKLIEESKNPIILVDACASRHNCKQETKELVEITQFPVFTTPMGKGTIDEGGVGGLLEDDPASIEKLKKKLDHGSSVSSRFGGVYVGNLSHPEVKEAVENADLILSIGSLLSDFNTGSFSYSYKTKNIVEFHSDYTKIRQATFPGVQMKEALQHLLKKVGKAASHYKPQPVPKVKLVNTPASRDSKLTQEWLWTRVSSWFREGDIIITETGTSAFGIVQSRFPNNTTGISQVLWGSIGFTVGATLGAVMAAEEIDPSKRVILFIGDGSLQLTAQEISTMIKWKTKPYLFVLNNDGYTIERLIHGENATYNDVQPWKNLDLLPLFSAEDYDAVKISTIGEAEDIFRDKEFKENTKIRMIEVMLPRMDASTNLIKQAEYLAKTNAAN

SEQ ID NO: 1530 - protein, 263 aa, Debaryomyces hansenii
  source 1..263: note = SBS00319_Succinate dehydrogenase iron-sulfur subunit
MFKSIIRQRNNFLGQKFRSLATSANAETRMKRFQIYRWNPDTPEVEPQMKTYEVDLNQCGPMVLDAILKIKNEQDATLTFRRSCREGICGSCAMNIGGRNTLACLCRIEDDTSKDLKIYPLPHMFVVRDLVPDLTHFYKQYKSIQPYLQRDTHPEDGRENLQSIEDRAKLDGLYECILCACCSTSCPSYWWNQQQYLGPAVLMQAYRWLIDSRDQASRARKEMLQNSMSLYRCHTIMNCSRTCPKGLNPGKAIAEIKKQLAFD

SEQ ID NO: 1531 - protein, 349 aa, Debaryomyces hansenii
  source 1..349: note = SBS00319_Alcohol dehydrogenase
MSSIPETQKAVVFESNGGPLEYKNIAVPKPKSTEILINVKYSGICHTDLHAWKGDWPLPVKLPLVGGHEGAGVVVAIGENVKGWEIGDLAGIKWLNGTCMSCEFCQNSNESNCPSADLSGYTHDGSFQQYATADAVQAARIPKGTDLAEVAPILCAGVTVYKALKSANLKAGQWVVISGAGGGLGSLCIQYATAMGYRVLSIDGGEEKGEFVKSLGSEAYVDFTKSKDIVTDIKNITNGGAHGVINVSVSEKAMSQSCEYVRSRGTVVLVGLPAGAEIKAPVFDAVVRSISIVGSYVGNRADTTEAIDFFSRGLIKCPIKVVGLSNLPLVYELMEQGKILGRYVVDTSK

SEQ ID NO: 1532 - protein, 414 aa, Debaryomyces hansenii
  source 1..414: note = SBS00319_Succinate--CoA ligase subunit beta
MLSRNIARASKTVANQKRFLSLHEFRSAALLKTYGVGVPEGSAATTPEKAYEAAKALGTNELVVKAQALTGGRGKGHFDNGFQGGVKLISSPEEARDLAEKMLGHKLITKQTGEAGKEVTAVYIVERRDARTEAYLAILMDRSTQTPLIVASSQGGMDIEGVAAKDPSAIKSFPVPLDEGVSDKLATEIASVLGYTQEAIPEAAKTVQNLYKVFMERDCTQVEINPLSETPDHKVLAMDAKLNFDDNAAFRQKEVFSWRDTTQEDPEEVMAAEYGLNFIKLDGNIANIVNGAGLAMATMDIIKLYGGAPANFLDCGGTATPETIEKAFELILSDKKVNGIFVNIFGGIVRCDYVAEGLIAATKNFNLDIPVVVRLQGTNMAQAKELIENSGLKLYAFEDLDPAAEKIVSLAPKA

SEQ ID NO: 1533 - protein, 835 aa, Debaryomyces hansenii
  source 1..835: note = SBS00319_Protein PDC2
MGYTIKQKIDICLKAESNPQMTQADLAIWAKQQYGSSRPPSQTTISRILCAKNDLIASKEVDFQLVRRRKQSNPILRRILTEWVTQATWENIPITTPIIQLTANAIWNRLPTFEKDGNGLFNQKWCNHFIRKLNINLAGSEEDIRNNPGNHELNKVWKLDEKMGLKNYLVDLIKHMNYKPQDIFTIDEFQLFYSLPLDQIFDVSSIDKGLKQSSSSTENSLTIMIGTNIDGSEKLSPLVVGKYDMFNISASSHPAFKNLSVYTTSRQNIMNKITEIFNVFYNSNINKWITSEMFQNYLLTLDHKLTSTSPNRKILILLDDSSSHRIINLKFRNIKLCYMKNNANCKNPYNSSYNGSSFNFLPTSFGIVEEFKILYRLQQYLEMIKLQRKNSKSNTDEVNDNSNISSGVNLNNYKANVNPSAAMEVLSESDYHVPLIKVIEWIKRAWDSITQEKIHMAWRKSHLINFKNPWPSLDPLITNQASLSLQPLALATNNYNSSKSYDKLSEIMATLNVVIPWEINELLGLVNERGKITLSYVSIEEIVGSCLLEAYDCNESGKEKTQSTITFNADENSENWFKETNIINKHNTTTNIMGKQFSTPIVSSTNNNNNDNIITSNTNMFAGTEMQFPEYNNTSLSSMNINTLLADTSNVISEVQMNNNDSTTDHTHMQLPQTSLVSEGAVSNKTNQSINTLSPISKFVATGDVSGVPDTRNSINRSGNCNASDHGHREKKRKLFPPNSRSSISYMPQSFNERVNSNSPFLNASLSHTSIVSLATSGDKDVSSATVSHDSSKEELPQLLSRLLEMSQTVDLKLTKSTIEELSTKLKEIQSNKSS

SEQ ID NO: 1534 - protein, 567 aa, Debaryomyces hansenii
  source 1..567: note = SBS00319_Pyruvate decarboxylase isozyme
MSEVTLGRYIFERLRQLLVQTVFGLPGDFNLSLLDKIYEVDGLRWAGNANELNAAYAADGYSRVKGLACLITTFGVGELSALNGIGGAFAEHVGLVHIVGVPSISSQAKQLLLHHTLGNGDFTVFHRMSNNISQTTAFISDIKSAPKEIDRCIREAYIFQRPVYIGLPANLVDINIPAMLLSTPIDLSLRENDPEAQQEVVDNILQLISEASNPIILVDACASRHNCNSEVEALVNKTQFPVLTTPMGKSGFNESHPRFAGVYVGTMSHAEVKTLVDGADLILAVGALLSDFNTGSFSYSYKTKNVVEFHADCIKIKQGTYPGVQMKEVLNVLLGNIDLAIKHYIPVTIPSPTLLTNSVTSSEVLSALLTQEWLWSKVSSWFKEGDIIITETGTSAFGIVQTKFPNNTIGISQVLWGSVGFTVGATLGAVMAAEEIDPNKRVILFVGDGSLQLTVQEISTMVKWETRPYIFVLNNDGYTIDRLIHGMSATYNDIQPWNNLALLPLFNAKYYDAIQVSTTDELEKLFSDEEFAINSKIRMIEVMLPRMDAPINLIKQMEFISKMNTDT

SEQ ID NO: 1535 - protein, 332 aa, Debaryomyces hansenii
  source 1..332: note = SBS00319_Malate dehydrogenase
MFTKVAARSFSSSASSAYKVAVLGANGGIGQPLSLLLKLNHKVTDLALYDLKGAPGVAADVSHIPTNSTVSGYDPEGLEQALTGSDVIVIPAGVPRKPGMTRDDLFNTNASIVRDLAKAAADYAPDAAVCVISNPVNSTVPIVAEVLKSKGTYNPKKLFGVTTLDVLRASRFVSEVAGSNPVHEKVTVVGGHSGITIVPLLSQTEHKSLDQETRDALIHRIQFGGDEVVQAKNGAGSATLSMAQAGARFTGAVLDGLAGEKDIVEPSFVDSPLFKGEGVEFFSSKVTLGQDGASIVHPLGELSDHEEKLVKEAKDTLIKNIQKGVEFVKQNP

SEQ ID NO: 1536 - protein, 338 aa, Debaryomyces hansenii
  source 1..338: note = SBS00319_Malate dehydrogenase
MVKVTVCGAAGGIGQPLSLLLKLNPKIDELSLFDVVNVPGVGADLSHICSNSSTSSHLPSSKEDKTALAESLKGSDLVIIPAGVPRKPGMTRDDLFNINASIVRDLAQGIAENAPKAFVLIISNPVNSTVPIVAETLKKNGVFNPQRLFGVTTLDIVRANTFISQKFPKETKATDFNINVIGGHSGETIVPLYSVGNSKSYFDKLSEEDKKALIHRVQFGGDEVVKAKDGAGSATLSMAYAGYKLAESILKALTSKGEEVVECTFLNLDDSIKGAAEAKKLVKDLDFFSLPVRLGTNGIEEVKYDILNNISADEKKLLEVAIDQLSGNISKGVAFIKK

SEQ ID NO: 1537 - protein, 307 aa, Debaryomyces hansenii
  source 1..307: note = SBS00319_Nitrilase
MKYNVAALQIGASPSGTPATLKKIMSYESQIQESSIKLVVMPEATIGGYPKGSTFGTYLGYRTQSGRGEFANYHKNAIIIPGPETEMLLDFSKRAGASLVIGAIEKAGATLFCTMIYIDSDLGYIGKHRKLMPTASERLVWGQGDGSGLITPDNKYLGKLGGAICWENYMPLYRATMYAKGINVYCAPTVDEREIWRSLMRTIGSEGRLFVVSAVQFLPPPEECGLDMPTWEKGRNSINGGSVIVNPYGDIIAGPLTGKEGLLTAEIDLDTIVEARYDLDVTGHYARNDIFKLTVDERPKDGVSFIS

SEQ ID NO: 1538 - protein, 578 aa, Debaryomyces hansenii
  source 1..578: note = SBS00319_Pyruvate decarboxylase isozyme
MLQKREETITLGRYLFERIRQLKVQSIFGVPGDFNLTLLDKIEEVNDLTWRGNANELNAAYAADGYSRVKSTDSSANGFACLVTTFGVGELSALNGIAGSYAEHVGLLHVVGIPATSAQQKQLLLHHTLGNGDYTVFKRMSSAITQTTGLVADAATGPAEIDRVIREAYINQRPSYLAFPTNMVDLEVSKLSLDTPIDLSMPENDQETESEVLERITELISNSKNPIILVDACCARHGATGEARKLIDLTKFKFAVTPMAKGAKYIDEDHERFAGVYVGTLSYPSVKEQVESSDLILSLGAMLSDFNTGSFSYSYQTKNVVEIHSDYTKIRSANYPNVRMKALLKKLLESDKLKEAASKYNPVKVDKDPFPEEKKDELSKITQQWLWSKVSGWLKENDIVITETGTSSFGIIQTQFPKNTLGISQILWGSIGYTVGATCGAVMAAQEIDPNRRVILFVGDGSLQLTVQEISSMAKNKTKPYIFVLNNNGYTIEKLIHGENADYNSIQPWDHLKILETFKADDYESIRVSTVKELLDLFSDQKFAKNDKIRLIELMFDTMDSPQNLIEQAKITAQTNSN

SEQ ID NO: 1539 - protein, 637 aa, Debaryomyces hansenii
  source 1..637: note = SBS00319_NAD-dependent malic enzyme
MLKSNNMNIRLAKSTRIGKIQIRSNSNSVNNSNSSIHTHTIKTPVGIKAAIASLKPKTTRLSIEGPIECDLQGFALLNAPGFNKGSAFSKEERQAFGLEGLLPSRINSLDEQVERAYRQFSYLKTPLAKNDFCTSMRIQNKVLYYELVRRHIREMIPIIYTPTEGDAIAAYSHRFRKPEGCFLDITEPDMIDKRLSAFGEDKDIDYIVVSDGEGILGIGDQGVGGVRIAIAKLGLMTLCGGIHPGRVLPIVLDVGTNNQELLHDELYMGNKFPRVRGKEYWDFIDKFIHAVKKRFPNAVLHYEDFGVSTGRKMLHKYRETLPSFNDDIQGTGAVVMASMTAALQFSDRNLLDSKVLIYGAGSAGLGIADQIVNHMVSHGATVEEARASIHCMDRRGLLLESFNDMSEGQAKYADPDSEWKGVDTRNLVEVIRHVKPTVLVGCSTQAGAFTEEVIKEMYSHNKQPIVFPLSNPTRLHEAFPVDIMKWTDNRALIATGSPFEPVNGFAISENNNCFTFPGIGLGAVLSRCTTISDTMVSAAVDQLALLSPKMENPKNGLLPRLEEIDEVSAKVATAVILQSLKEGTARVESEQKPDGGFVEVPKEFNKCLKWVQSQMWKPIYRPLVKVKHVPEVHTYQH

SEQ ID NO: 1540 - protein, 673 aa, Pichia kudriavzevii
  source 1..673: note = SBS04263_Acetyl-coenzyme A synthetase 2
MTKTHSVVHEANGVIARPTPKPFFEKQPSASLSSKEEYDEMYKQSIQDPEGFFGPMAKKFLSWDKDFTKVKSGTLANGDAAWFINGELNACYNCVDRHAFKNPDKVAIVFEADDESESRKITFGELLRDVSQVAGVLQSWGVKKGDTVAIYLPMTPEAIIAMLACARIGAIHSVIFAGFSAGSIKERVTDANSKVLITTDEGKRGGKIVNNKTIVDEALKDCPSVEKVLVYKRTGNPKINMKEGRDYYWQDLAPEFRGYLPCVSVNSEDPLFMLYTSGSTGAPKGVVHSTGGYLLGAAMTTKYVFDLQEEDVLFTAGDVGWITGHSYALYGPMTLGVSTIIFEGTPAYPNFGRFWRIIERNKATHFYVAPTALRMLKKSGEEEIAKYDLSSLRTLGSVGEPIASEIWQWYDEKIGHGCCHISDTYWQTESGSHLIAPLAGSVPTKPGAATLPFFGIDAVIIDPTSGKVLEGNDVEGVLAIKNTWPSMARTVYKNHKRYMETYLKPYPGYYFTGDGAGRDHDGYYWIRGRVDDVVNVSGHRLSTAEIEAVLLEDSKRVSDAAVVGINDDITGQAVIAFVQLKDNSLVSDEASLLKLRQDLRLSIRATIGPFAAPKTIIIVDDLPKTRSGKIVRRVLRKIVSGEAKALGDQSTLANPECIEPIIVAVESQFGVKN

SEQ ID NO: 1541 - protein, 671 aa, Pichia kudriavzevii
  source 1..671: note = SBS04263_Acetyl-coenzyme A synthetase 1
MAQKHLENEHLMNIEHMEVPSGFLERHPSKPYLTSLDQYKKMYKESIEQPGQFFAKMARENLSWFKDFTVAKVPEAPHLQDNNGEPSAWFVDGEINACYNCVDRWAIESPNKPAIIYEADEPNEGRVITYGELLKDVCKFAQVLKNLGVKKGDTVAVYLPMIPEAIVALMAIIRIGAIHSVIFAGFSSTSLRDRVLDANSKIVITADESKRGGKIIETKKIVDDAITQCPDVSNVVVFRRTGNSHIPWNSERDVWWHEEVSKYGPYCPAEPMNSEDPLFLLYTSGSTGKPKGILHTTAGYLLGALLTTKYVFDVHPEDIIFTAGDVGWITGHSYVVYGPLLNGATTVVFEGTPAYPNFSRYWEIVDKYGVNQFYVAPTALRLLKRAGEKYIENYKLNTLRVLGSVGEPIAKDVWEWYNEFIGRGKAHICDTYWQTESGSHLIAPLAGITPTKAGSASLPFFGIEPAIVDPVTGEELKGNNVEGVLCVKTAWPSMTRSIWNDYGRYLETYLKPYHGHYFSGDGAARDKDGFYWILGRVDDVVNVSGHRLSTAEIEAALIEHPLVSENAVVGFPDELTGSAVASFVSLKKDVEDREAIKKELILTVRKEIGPFAAPKVILLVNDLPKTRSGKIMRRILRKVLAGEEDQLGDISTLSNPDVVAHIIDVVMQHRK

SEQ ID NO: 1542 - protein, 411 aa, Pichia kudriavzevii
  source 1..411: note = SBS04263_isocitrate dehydrogenase
MAFEKIKVKTPVVEMDGDEMTRIIWKMIKDQLILPFLDIDLDYYDLGIEYRDKTNDQVTVDSANATKKYGVAVKCATITPDEARVEEFGLKKMWLSPNGTIRNILGGTVFREPIIIENIPRIIQHWEKPIVIGRHAFGDQYKCQNIVTPECGGDLKLVFTPKDGSDVIEVPVYEYKGKGAALAMYNTEESITGFARASFELAISRKLPLYMSTKNTILKQYDGLFKDTFENMYQSEYKDKFEELGIWYEHRLIDDMVAQMIKSKGGYIIAMKNYDGDVESDIVAQGFGSLGLMTSVLVSADGKTFESEAAHGTVTRHYRQHQQGKETSTNSIASIFAWSRGLIKRGELDSTPDVVKFAQVLEKATIDTVRVDGIMTKDLALARGEIDRSAYVTTGEFIESVAKRLTKELGA

SEQ ID NO: 1543 - protein, 441 aa, Pichia kudriavzevii
  source 1..441: note = SBS04263_isocitrate dehydrogenase
MFAASTRAHLRLAAIKRHFSTSPCALEKIHVKNPIVELDGDEMTRIIWSDIKNKLILPYLDVDLKYYDLSIQSRDASDDQITVDAANAIKKYGVGIKCATITPDEARVKEFGLKKMWLSPNGTIRNILGGTVFREPIVIGSGPDKAPNDIEIPRLVPGWKKPIIIGRHAHADQYKATDFVVPEAGTLEVTFTPKDPRGEKINRTVYEYKGPGVALSMYNTEESIRGFAHSSFKMALNRKAPLFLSTKNTILKKYDGKFKDIFQEIYETTYKAEFESKGLTYEHRLIDDMVAQMLKSQGGFVLALKNYDGDVQSDIVAQGFGSLGLMTSVLMTPDGKAFESEAAHGTVTRHYRKYQQGEETSTNSIASIFAWTRGIAQRGKLDATPEVVEFANTLEKCVLDTVSKDGIMTKDLALLVKKKEYATTEGFLDAVAARLSKNIKV

SEQ ID NO: 1544 - protein, 603 aa, Pichia kudriavzevii
  source 1..603: note = SBS04263_NAD-dependent malic enzyme
MTKDCCEVTKIPVGEEAKVTVPRSTRLSATGPVECDLSGFQVLNSPLFNKGTAFTIAEREAFGLNGLLPPVVNTLEEQVERSYKQLHFLKTPLAKNDFCTSLRLQNKVLFYRLVKEHIKELIPIVYTPTEGDAIIAYSDRFRKPEGLFLDITRPNEIDQRLEQFGEDKDVDYIVITDSEGILGIGDQGVGGVRITIAKAALMTVCAGLHPGRVVSCVLDVGTNNVKLLEDDLYLGNRFPRVRGKEYDDFVNKTIRAMKKRFPSAVIHFEDFGVTTARPVLERFRDEIPCFNDDIQGTGAVVMASMAAALKLTHRNLLDSKVLIYGAGSAGLGIADQIVNHMVSHGATKEEARRKIYCMDRYGLILKGMTSNSPAQEDYAHDPKDWENISTTSLVDVIEKVKPTTLVGCSTQAGAFNEEVIKTMYKHNPRPMIFPLSNPTRLHECFPEDALKWTDFNALVATGSPFPPVEGHVISENNNCFAFPGIGLGAVLARTTRISDNMISAAVDELASLSPAQKDPKLGLLPPIEEIDETSARIATAVILKAVEEGFARVEEEDSPLGGKVKIPREFDPCLRWVKEQMWHPIYRPMIKVAHSDNIHTHQY

SEQ ID NO: 1545 - protein, 568 aa, Pichia kudriavzevii
  source 1..568: note = SBS04263_malate synthase
MTKPAELYCTSLEGVQVVGEVSDKPLLSEATPRDILTIDALKFVVLLHRAFNGTRKQLLANRQDVQKRLDAGESLTFLKETEYIRNDPNWRCATNHPKLMCRKVEITGPPDAKMIINAFNTNVHTYMTDFEDSCAPTWSNMLYGQVNLYDAIRDKIDFTNDKTGKRYKINREGRRVPVMIVRPRGWHMVDQHILVDGEPISASILDFGLFFYHNAKYLISQGLGPFFYLPKMEHWKEAKLWNDIFCVAQDCLEIPRGTIKATVLIETLPISYQLDEVLYALKDHSSGLNCGRWDYMFSTIKRLRNQKDKILPDRQQVTMTVPFMTNYVKQLIKVCHKRGVHAMGGMAAFIPIKNDEEANKVALEAVRKDKLREVLAGHDGTWIAHPGLLDTALSVFEEHMPTPNQLYKLKDDVSVTESDLVDTNIEGGQITMKGLNANIYIGLNYMESWLRGLGCVPINHLMEDAATAEVSRLQLWSWCKHQVKMNDTGKTITPDFVCQLIDEEVARCSHKEGNKYELAAQCLKDEISGKKPVAEFLTDILYPYIATPGKPVDLNSLKQSTPVCASRL

SEQ ID NO: 1546 - protein, 334 aa, Pichia kudriavzevii
  source 1..334: note = SBS04263_malate dehydrogenase
MFSRISARQFSSSAASAYKVTVLGAAGGIGQPLSLLMKLNHKVTNLSLYDLRLGAGVATDLSHIPTNSVVKGYGPENNGLKDALTGSDVVLIPAGVPRKPGMTRDDLFNTNASIVRDLAKAAADHCPNAVLLIISNPVNSTVPIVAEVLKSKGVYNPKKLFGVTTLDVLRSSRFLSEVVNTDPTTETVTVVGGHSGVTIVPLISQTKHKDLPKETYEALVHRIQFGGDEVVKAKDGAGSATLSMAQAGARMASSVLKGLAGEVDIVEPTFIDSPLFKSEGVEFFSSRVTLGPEGVQEVHPLGVLSTAEEEMVATAKETLKKNIQKGVDFVKANP

SEQ ID NO: 1547 - protein, 350 aa, Pichia kudriavzevii
  source 1..350: note = SBS04263_alcohol dehydrogenase
MSYEIPQTQKACVFYENGGPITYKDIPVPKPKPTEILVKVLYSGVCHTDLHAWKGDWPLATKLPLVGGHEGAGVVVAKGENVTSFEIGDYAGIKWLNGSCMGCEFCEQGAEPNCPKADLSGYTHDGSFQQYATADAIQAAHISKETDLAGVAPILCAGVTVYKALKTADLRAGEWVCISGAAGGLGSLAIQYAKAMGLRVVGIDGGDEKKELCKSLGAEAFIDFTKTKDIVKAVQEATNGGPHGVINVSVSEAAISQSCEYVRPLGKVVLVGLPAGAQVKTGVFEAVVKSIEIKGSYVGNRKDTAEALDFYTRGLVKSPFKIVGLSELPKVFELMEQGKILGRMVLDTSK

SEQ ID NO: 1548 - protein, 377 aa, Pichia kudriavzevii
  source 1..377: note = SBS04263_alcohol dehydrogenase
MLSKTITAALRGNTTRTAFRINAIRSLAIPAIPETQKGVIFYENGGELFYKDIPVPKPKPNEILVNVKYSGVCHTDLHAWKGDWPLATKLPLVGGHEGAGVVVAKGDNVTNFEIGDYAGIKWLNGSCMGCEFCQQGAEPNCPQADLSGYTHDGSFQQYATADAVQAAKIPQGTDLAQVAPILCAGITVYKALKTAELRPGQWVAISGAAGGLGSLAVQYAKAMGLRVLGIDGGEEKGKFAKSLGAEVFIDFTKSKDIVKDIQEATNGGPHGVINVSVSPAAISQSTQYVRTLGKVVLVGLPAHAVCESSVFDHVVKSIQIRGSYVGNREDTSEAIDFFTRGLVKSPIKIVGLSELPKIYELMEQGKILGRYVVDTSK

SEQ ID NO: 1549 - protein, 376 aa, Pichia kudriavzevii
  source 1..376: note = SBS04263_alcohol dehydrogenase
MFASTFRSQAVRAARFTRFQSTFAIPEKQMGVIFETHGGPLQYKEIPVPKPKPTEILINVKYSGVCHTDLHAWKGDWPLPAKLPLVGGHEGAGIVVAKGSAVTNFEIGDYAGIKWLNGSCMSCEFCEQGDESNCEHADLSGYTHDGSFQQYATADAIQAAKIPKGTDLSEVAPILCAGVTVYKALKTADLRAGQWVAISGAAGGLGSLAVQYAKAMGLRVLGIDGGEGKKELFEQCGGDVFIDFTRYPRDAPEKMVADIKAATNGLGPHGVINVSVSPAAISQSCDYVRATGKVVLVGMPSGAVCKSDVFTHVVKSLQIKGSYVGNRADTREALEFFNEGKVRSPIKVVPLSTLPEIYELMEQGKILGRYVVDTSK

SEQ ID NO: 1550 - protein, 524 aa, Pichia kudriavzevii
  source 1..524: note = SBS04263_Potassium-activated aldehyde dehydrogenase
MLRLTTRTNTLRSPRVFSALSSIRCYSDLPVYQTITLPNGQTYEQPTGLFINGEFVKSQQHKTFEVINPSTEEEICHVHEARAEDVDLAVDAANKAFHSTWSKMDPSIRGKYLLNLADLMEAHKDTLAAIESMDNGKALVSAQGDVGLVINYLRYCAGYADKLFGKLVDTGSNYFNYIKREPIGVCGQIIPWNFPLLMWSWKVGPALAAGNTIVLKTAESTPLSALYAAKLAQEAGIPKGVINIVSGFGKITGEAISLHPKIKKLAFTGSTATGKHIMKAAAESNLKKVTLELGGKSPNIVFNDADIKKAVNSLVLGIFFNSGEVCCAGSRVFIQEGVYDEVLEEFKKAAENLKVGNPFEDGVFQGAQTSQQQLSKILSYVDSAKSEGATLIAGGERLGDKGFFVKPTIFADVKPTMKIYTEEIFGPFAAVTKFKTADEAIKLANDSEYGLAAGIHTKSLDTATYVANNLEAGTVWINTYNDFHHNMPFGGFKQSGIGREMGEEAFENYTQWKTVRVAINDGPQ

SEQ ID NO: 1551 - protein, 253 aa, Pichia kudriavzevii
  source 1..253: note = SBS04263_succinate dehydrogenase
MMMKNFIRNMATTAAKTPNLKTFKIYRWNPDTPDVKPHMQSYTLDMNKTGPMVLDALLKIKNEHDPTLTLRRSCREGICGSCAMNIGGRNTLACLCKIDKDSGKDLKIYPLPHMYIVRDLVPDLTLFYKQYKSIQPYLQSDKPMPERENLQSIEDRKKLDGLYECILCACCSTSCPSYWWNQQEYLGPAVLMQAYRWMVDSRDQATKMRKDMLQNSMSLYRCHTIMNCSKTCPKGLNPGGAIAEIKKSMALDA

SEQ ID NO: 1552 - protein, 640 aa, Pichia kudriavzevii
  source 1..640: note = SBS04263_succinate dehydrogenase
MLSLQRSVKSISASKRFFSNTPASRQVINRFNNLNGKEASSAMAKDYHVIDHEYDCVVVGAGGAGLRAAFGLVKEGFKVACISKLFPTRSHTVAAQGGINAALGNMHKDDWHWHMYDTVKGSDWLGDQDAIHYMTREAPPSIIELEHYGLPFSRNKEGKIYQRAFGGQTKDYGKGGQAYRTCAVADRTGHALLHTLYGQSLRYDTHYFIEFFALDLLKHNGEIVGCIAYNQEDGTLHRFKAHKTIIATGGSGRAYFSCTSAHTCTGDGSAMVARAGYPLEDMEFIQFHPSGIYGSGCLITEGARGEGGYLINSEGERFMERYAPHAKDLACRDVVSRAITMEINAGRGVGPEKDHMYLQLSHLPPSVLQERLPGISETAKIFAGVDVTKEPIPIIPTVHYNMGGIPTKWSGEALTVNEKGEDVVIPGLYACGEAACASVHGANRLGANSLLDLVVFGRAVAHSIAAELKPGTPHKELPADIGFESIANLDKLRNASGSTPTAELRLEMQKAMQKHVAVFRTQDNLDAGVSELERIDAKFADIKTTDRSMIWNTDLTETLELQNLLTCAKQIATSAAARKESRGAHARDDYPNRDDENWQKHTLSWQTKTGEPVKLGYRKVITTTLDEAECKPVPPTVRAY

SEQ ID NO: 1553 - protein, 166 aa, Pichia kudriavzevii
  source 1..166: note = SBS04263_succinate dehydrogenase
MFRSTARRALHISRPLFIAKPKADSVPIDKTAAPQGYLQGKPVKNYYVDEETNEIVIKVQPLKREGESLETMRKRLTYQSRKRGILETDLLMSRFAKKYLSSFDRGMLEEYDKLLDELDWDIYYWATENYKITPLPDKWKDSKVLKLIQQESRNEKKEILRMPSLN

SEQ ID NO: 1554 - protein, 415 aa, Pichia kudriavzevii
  source 1..415: note = SBS04263_succinate--CoA ligase [ADP-forming] subunit beta
MFSTHLAKKLLSRRSVQQVRHLSIHEYRSAALLKSYGVGVPRGEAARSPEEAYKAAKDLNTNEMVLKAQALTGGRGKGHFDNGLQSGVRLVETPEEVKELSAKMLGHKLITKQTGEAGKIVTAVYVVERKYALTEAYLSIVMDRKNQSTMIIASAQGGMDIEGVAKKDPNAIKKYSVDLEAGVSDDLAFEIASQLGFTKDAIPQGAKTIQTLYQIFKDKDATQIEINPLTETKQHEVMCMDAKFNFDDNAAFRQQEVFSWRDVTQEDPDEVVASKYGLNFIKLNGNVGCLVNGAGLAMATMDVVKLYGGEPANFLDVGGAATPETIEKAFELIITEKNVSAIFVNIFGGIVRCDYVADGLIQATKNLGLKIPVVVRLQGTNFEIAKDMINKSGLKLYVEEDLDEAAKKAVELGGK

SEQ ID NO: 1555 - protein, 575 aa, Pichia kudriavzevii
  source 1..575: note = SBS04263_Pyruvate decarboxylase isozyme 3
MTDKISLGTYLFEKLKEAGSYSIFGVPGDFNLALLDHVKEVEGIRWVGNANELNAGYEADGYARINGFASLITTFGVGELSAVNAIAGSYAEHVPLIHIVGMPSLSAMKNNLLLHHTLGDTRFDNFTEMSKKISAKVEIVYDLESAPKLINNLIETAYHTKRPVYLGLPSNFADELVPAALVKENKLHLEEPLNNPVAEEEFIHNVVEMVKKAEKPIILVDACAARHNISKEVRELAKLTKFPVFTTPMGKSTVDEDDEEFFGLYLGSLSAPDVKDIVGPTDCILSLGGLPSDFNTGSFSYGYTTKNVVEFHSNYCKFKSATYENLMMKGAVQRLISELKNIKYSNVSTLSPPKSKFAYESAKVAPEGIITQDYLWKRLSYFLKPRDIIVTETGTSSFGVLATHLPRDSKSISQVLWGSIGFSLPAAVGAAFAAEDAHKQTGEQERRTVLFIGDGSLQLTVQSISDAARWNIKPYIFILNNRGYTIEKLIHGRHEDYNQIQPWDHQLLLKLFADKTQYENHVVKSAKDLDALMKDEAFNKEDKIRVIELFLDEFDAPEILVAQAKLSDEINSKAA

SEQ ID NO: 1556 - protein, 524 aa, Pichia kudriavzevii; identical to SEQ ID NO: 1550
  source 1..524: note = SBS04263_Aldehyde dehydrogenase

SEQ ID NO: 1557 - protein, 714 aa, Hafnia paralvei
  source 1..714: note = Hafnia paralvei _methylmalonyl-CoA mutase; tr|A0A4Q9EGN8|A0A4Q9EGN8_9GAMM
MVNIHAWEELANKELGRQGKKVQDLVRETSEGIAVKSLYTAHDLEGLEVTDSLPGMAPYVRGPRATMYAGQPWTIRQYAGFSTAKESNAFYRRNLAAGQKGLSVAFDLATHRGYDSDNPRVAGDVGKAGVAIDSVEDMKVLFDQIPLDKMSVSMTMNGAVLPIMAFYIVAAEEQGIGPELLTGTIQNDILKEYLCRNTYIYPPAPSMRIISDIIAWSSQNMPRFNTISISGYHMSEAGANCVQQVAFTIADGIEYIKAALKAGLNIDDFAPRLSFFFGIGMDLFMNIAMLRAARYLWSEAVSQFGATNPKSLALRTHCQTSGWSLTEQDPYNNIVRTTIEALGATLGGTQSLHTNAFDEALGLPTDFSARIARNTQIIIQEESEICRTIDPLAGSYFVESLTDQIVKQARAIIQKIDDVGGMAKAIEVGLPKRMIEEASANEQSLIDQGKRVIVGVNKYKLDKEAETQILEIDNVKVRNEQIAQLQRIRATRDNDAVQQALTRLRHAAQHNENLLEVAIEAARLRATLGEISDTIEAVFDRYLVPSECVTGVIARSYHQSENDAQAFDQILAQTQNFLTETGRRPRILIAKMGQDGHDRGAKVIASAYSDLGFDVDLSPMFSTPQEIARLAVENDVHVIGASSLAAGHKTLIPELIAALHQYGRQDICVVAGGVIPPQDYTFLREHGVSAIYGPGTPMLVSVRDVLQLISAHHD

SEQ ID NO: 1558 - protein, 476 aa, Butyrivibrio proteoclasticus
  source 1..476: note = Butyrivibrio proteoclasticus_methylmalonyl-CoA decarboxylase; tr|E0S2J8|E0S2J8_BUTPB
MSSSSQARQRINALLEENSFVEIGALVTARNTDFNLKQEETPSDGVVTGYGVIDGNLVYVYSQDASVLGGSIGEMHARKIVRLYELAIKTGSPVIGLIDSTGLRLQEATDALNGFGEIYLKQVEASGVVPQITAIFGACGGGLAIIPSITDFTFMESEKAKLFVNSPNALDGNYKEKCDTSAAKWQSTETANVDVVSDEASIYAQIRELVSILPSNNEDGDSYQECSDDLNRACENLDGATADPSLIARQISDNGLFFETKREYAKEMVTGFIRLNGATVGLVGNRTAVFDENGKEAEKFADKLTAHGLEKAAEFITFCDAFDLPVLTLTNATGFGTSKCDEKHVAKAAGRLVYSLANATVPKVNLITGKAFGSAYVIMNSKAIGADVTISWPDAQVGTMDANLAAKIICDGKDAETVSKAAAEYAALQNNVKSAAARGYVDEIVEPADTRKYVVGAFEMLFTKRDERPAKKHGTV

SEQ ID NO: 1559 - protein, 516 aa, Clostridium perfringens
  source 1..516: note = Clostridium perfringens _propionyl-CoA:succinate CoA transferase; tr|A0A0H2YQC0|A0A0H2YQC0_CLOP1
MVRVSFLKPCEVAEFVKDGDTIVTEGFVASCCPESLTKALEKRFLETGHPRNLTLMYSAAQGNRDGSGADHFAHKGMTKRVIAGHWNMAPKLGKMAVENEIEAYNLPQGTLAQLFRDIAGKRVGTITHVGLNTFVDPRISGGKLNEVTKEDIVKLIEIEGEEKLLYKSFPIDVCFLRGSSADECGNVTLDREVATLDVTSIAQACKNNGGKVFVQVERVVSGGCLDPRLVKIPGIYVDGIVLAEPCDHEQCLGMKFNPAYTGEVRIPLSSIEKAPLNARKIIARRAAMELKKDTIVNLGIGIPEVISLVANEEGIGDYMTLTVESGPVGGVPQGGAAFGACINPDAILDQPYQFDFYDGGGVDLAFLGLAQADRNGNINVSKFGPRIAGCGGFINITQNAKKVIFCGTFTASGLKVETGDGKLHIIQEGKSNKFLEDVEQITFSGEYANKTNQPVMYITERAVFELRNDGLHLTEIAPGVNLEEDILAHMDFVPNIDEPLKLMDERIFYDKLMGLK

SEQ ID NO: 1560 - protein, 516 aa, Clostridium perfringens; identical to SEQ ID NO: 1559
  source 1..516: note = Clostridium perfringens_Propionate CoA-transferase; tr|A0A0H2YQC0|A0A0H2YQC0_CLOP1

SEQ ID NO: 1561 - protein, 509 aa, Veillonella parvula
  source 1..509: note = Veillonella parvula_Methylmalonyl-CoA decarboxylase subunit alpha; sp|Q57079|MMDA_VEIPA
MATVQEKIELLHEKLAKVKAGGGEKRVEKQHAQGKMTARERLAKLFDDNSFVELDQFVKHRCVNFGQEKKELPGEGVVTGYGTIDGRLVYAFAQDFTVEGGSLGEMHAAKIVKVQRLAMKMGAPIVGINDSGGARIQEAVDALAGYGKIFFENTNASGVIPQISVIMGPCAGGAVYSPALTDFIYMVKNTSQMFITGPAVIKSVTGEEVTAEDLGGAMAHNSVSGVAHFAAENEDDCIAQIRYLLGFLPSNNMEDAPLVDTGDDPTREDESLNSLLPDNSNMPYDMKDVIAATVDNGEYYEVQPFYATNIITCFARFDGQSVGIIANQPKVMAGCLDINASDKSSRFIRFCDAFNIPIVNFVDVPGFLPGTNQEWGGIIRHGAKMLYAYSEATVPKITVITRKAYGGSYLAMCSQDLGADQVYAWPTSEIAVMGPAGAANIIFKKDEDKDAKTAKYVEEFATPYKAAERGFVDVVIEPKQTRPAVINALAMLASKRENRAPKKHGNIPL

SEQ ID NO: 1562 - protein, 422 aa, Anaerotignum propionicum
  source 1..422: note = Anaerotignum propionicum_lactoyl-CoA dehydratase subunit alpha ; sp|G3KIM4|LCDA_ANAPI
MSLTQGMKAKQLLAYFQGKADQDAREAKARGELVCWSASVAPPEFCVTMGIAMIYPETHAAGIGARKGAMDMLEVADRKGYNVDCCSYGRVNMGYMECLKEAAITGVKPEVLVNSPAADVPLPDLVITCNNICNTLLKWYENLAAELDIPCIVIDVPFNHTMPIPEYAKAYIADQFRNAISQLEVICGRPFDWKKFKEVKDQTQRSVYHWNRIAEMAKYKPSPLNGFDLFNYMALIVACRSLDYAEITFKAFADELEENLKAGIYAFKGAEKTRFQWEGIAVWPHLGHTFKSMKNLNSIMTGTAYPALWDLHYDANDESMHSMAEAYTRIYINTCLQNKVEVLLGIMEKGQVDGTVYHLNRSCKLMSFLNVETAEIIKEKNGLPYVSIDGDQTDPRVFSPAQFDTRVQALVEMMEANMAAAE

SEQ ID NO: 1563 - protein, 374 aa, Anaerotignum propionicum
  source 1..374: note = Anaerotignum propionicum_lactoyl-CoA dehydratase subunit beta ; sp|G3KIM3|LCDB_ANAPI
MSRVEAILSQLKDVAANPKKAMDDYKAETGKGAVGIMPIYSPEEMVHAAGYLPMGIWGAQGKTISKARTYLPAFACSVMQQVMELQCEGAYDDLSAVIFSVPCDTLKCLSQKWKGTSPVIVFTHPQNRGLEAANQFLVTEYELVKAQLESVLGVKISNAALENSIAIYNENRAVMREFVKVAADYPQVIDAVSRHAVFKARQFMLKEKHTALVKELIAEIKATPVQPWDGKKVVVTGILLEPNELLDIFNEFKIAIVDDDLAQESRQIRVDVLDGEGGPLYRMAKAWQQMYGCSLATDTKKGRGRMLINKTIQTGADAIVVAMMKFCDPEEWDYPVMYREFEEKGVKSLMIEVDQEVSSFEQIKTRLQSFVEML

SEQ ID NO: 1564 - protein, 325 aa, Rahnella woolbedingensis
  source 1..325: note = Rahnella woolbedingensis_acryloyl-CoA reductase; tr|A0A419NE84|A0A419NE84_9GAMM
MKALVLEQQDKTTVAEVKDIALPEMAEGDVLVDISWSGLNYKDALAITGKGKIIRQFPMVPGIDFTGHVKRSNDPRYSTGQAVILTGWGVGENHWGGLAQQACVKGDWLVALPEAIPARNAMIIGTAGFTAMLCVMALEDAGVTPQSGTVLVTGASGGVGSTAVALLHTLGYTVAAVTGRESTHDYLRKLGASEILSRDDFSETRPLEKQLWAGAIDTVGDKVLAKVLAQTNYGGCVAACGLAGGFGLPTTVMPFILRNVRLQGVDSVSVPAEHRAAVWERLASTLPESFYQQAATEITLEQAPAYAEDFLNNKIQGRTLVKIGG

SEQ ID NO: 1565 - protein, 554 aa, Citrobacter braakii
  source 1..554: note = Citrobacter braakii_Propanediol dehydratase; tr|A0A1R0FUI3|A0A1R0FUI3_CITBR
MRSKRFEALAKRPVNQDGFVKEWIEEGFIAMESPNDPKPSIKIVNGTVTELDGKSASEFDLIDHFIARYGINLARAEEVMAMDSVKLANMLCDPNVKRKDIVPLTTAMTPAKIVEVVSHMNVVEMMMAMQKMRARRTPSQQAHVTNVKDNPVQIAADAAEGAWRGFDEQETTVAVARYAPFNAIALLVGSQVGRPGVLTQCSLEEATELKLGMLGHTCYAETISVYGTEPVFTDGDDTPWSKGFLASSYASRGLKMRFTSGSGSEVQMGYAEGKSMLYLEARCIYITKAAGVQGLQNGSVSCIGVPSAVPSGIRAVLAENLICSSLDLECASSNDQTFTHSDMRRTARLLMQFLPGTDFISSGYSAVPNYDNMFAGSNEDAEDFDDYNVLQRDLKVDGGLRPVREEDVIAIRNKAARALQAVFAGMGLPPITDEEVEAATYAHGSKDMPERNIVEDIKFAQEIINKNRNGLEVVKALAQGGFTDVAQDMLNIQKAKLTGDYLHTSAIIVGDGQVLSAVNDVNDYAGPATGYRLQGERWEEIKNIPGALDPNELG

SEQ ID NO: 1566 - protein, 469 aa, Acetobacterium woodii
  source 1..469: note = Acetobacterium woodii_CoA-dependent propionaldehyde dehydrogenase, pduP; tr|H6LEP1|H6LEP1_ACEWD
MNIDTTGIEYIVKKVMAEIDCAEEGGKPLKDGELGIFNDMENAIDAAFIAQKSFMRASMAFRSKIIAAMRAEMLKKENMEMICQMAVEETGMGNYEHKLLKHELAATKTPGVEDLVADAFTGDDGLTLIEQSPFGVIGAVSPSTNPSETIICNGIGMLAGGNTVVFAPHPSAKKTSALVVKLLNKAILEAGGPENLIVTTVKPTIDSANTMFASPKITMLCATGGPGVVKSVLQSGKKAIGAGAGNPPALVDETADIEKAGKDIIDGCCFDNNLPCIAEKEVVVVEQVADYLIFNMKKNGAYELKDAQKIKELEELVIPGGRLSRDYVGRSAKVILKGIGIEVDDSVRVVIIETSKDHIFAVEELMMPILAIVRVKDVAEGIDLAVSLEHGNRHTAIMHSTNINNLTEMAKRVQTTIFVKNGPSYAGIGVGGEGYTTFTIAGPTGEGLTSAKTFTRKRRCVLVGGFTIK

SEQ ID NO: 1567 - protein, 402 aa, Enterobacter sp.
  source 1..402: note = Enterobacter sp_Propionate kinase; sp|A4WEU0|TDCD_ENT38
MIEFPVVLVINCGSSSVKFSVLDAASCEALITGIADGVNTENAFISVNGGEPAPLARKDYEGALAAIALELEARDLMGSVALIGHRIAHGGSVFSESTPITDEVIDQIREISPLAPLHNYANLSGVEAAKHLFPGVQQVAVFDTSFHQTLAPQAYLYGLPYRYFEELGVRRYGFHGTSHRYVAQQAYSLLDIPQQDSGLVIAHLGNGASICAVRNGESVDTSMGMTPLEGLVMGTRCGDVDFGAMAWIAQQTGQTLDDLERVVNKESGLLGISGLSSDLRTLEKAWHDGHERARLAIETFVHRIARHIAGHAASLHRLDGVVFTGGIGENSKLIRQLVTDRLKVFGITLDPLKNALPGSAGERIITTDDSDVPCAVIPTNEEKMIALDAIRLGKVHPAAAYA

SEQ ID NO: 1568 - protein, 554 aa, Bacillus azotoformans
  source 1..554: note = Bacillus azotoformans_Propanediol dehydratase, large subunit; tr|A0A072NH25|A0A072NH25_BACAZ
MKSKRFQVLAERPVNQDGFVAEWPEVGLMAMDGPYDPKPSIKIENGVIVELDGKTRDEFDFIDRFIADYAINIEKTEEAMAIDSVQFARMLVDINVPREKIVPLTTAMTPAKLCEVVADMNVVELMMALQKMRARKTPSNQCHVTNVKDNPVQIAADAAEAALRGFDEQETTVGIVRYAPFNALGLLVGSQTGRGGILTQCSVEEATELEMGMRGLTSYAETVSVYGTEPVFVDGDDTPYSKTFLASAYASRGLKMRFTSGTGSEVQMGYAEGKSMLYLEARCVYIAKGAGSQGLQNGSISCIGVPGGVPSGIRAVLAENLFTTMLDMEVASGNDQTFSHSDIRRTARTLMQMLPGTDFIFSGYSSVPNYDNMFAGANFDAEDFDDYNVLQRDLKVDGGLRPVSEEEVVAVRNKAARAVQSVFEGLGLPTITDEEVEAATYAHGSKDMPDRNIVEDLRAVDSMMKRGVTGLDVVKALSKGGFEDVAENVLNMLKQRVSGDYLHTSAIINKDWNVISAVNDLNDYRGPGTGYRISEERWEEIKNIPRAIRPEDVN

SEQ ID NO: 1569 - protein, 256 aa, Bacillus azotoformans
  source 1..256: note = Bacillus azotoformans_Propanediol dehydratase, medium subunit ; tr|A0A072NHV5|A0A072NHV5_BACAZ
MPQIFKGSFSSKLEKIWAQIRQGAFDQGRGLIYMAINEKLIREVIEEVLLSLKVENQQPEIIAGPKPSSVINAVQGLELTETGIATVGARKDEVVVALAPAFGIHQTKTIVKVPHNEVLKEVIAGIEEEGLTARVIRVYHTSDVGFVAHQAAKISGSGIGIGIQSKGTTVIHQKDLQPLANLELFPQAPLLDSDTFRAIGKNAAKYAKGESPNPVPTKNDQMARPKYQAIAALLHIKETEHVDRNKKPVELQVKFN

SEQ ID NO: 1570 - protein, 402 aa, Salmonella typhimurium
  source 1..402: note = Salmonella typhimurium_Propionate kinase; sp|O06961|TDCD_SALTY
MNEFPVVLVINCGSSSIKFSVLDVATCDVLMAGIADGMNTENAFLSINGDKPINLAHSNYEDALKAIAFELEKRDLTDSVALIGHRIAHGGELFTQSVIITDEIIDNIRRVSPLAPLHNYANLSGIDAARHLFPAVRQVAVFDTSFHQTLAPEAYLYGLPWEYFSSLGVRRYGFHGTSHRYVSRRAYELLDLDEKDSGLIVAHLGNGASICAVRNGQSVDTSMGMTPLEGLMMGTRSGDVDFGAMAWIAKETGQTLSDLERVVNKESGLLGISGLSSDLRVLEKAWHEGHERARLAIKTFVHRIARHIAGHAASLHRLDGIIFTGGIGENSVLIRQLVIEHLGVLGLTLDVEMNKQPNSHGERIISANPSQVICAVIPTNEEKMIALDAIHLGNVKAPVEFA

SEQ ID NO: 1571 - protein, 216 aa, Clostridium novyi [sequence omitted]

SEQ ID NO: 1572 - protein, 400 aa, Bacillus mycoides
  source 1..400: note = Bacillus mycoides_2-hydroxyglutarate dehydrogenase; tr|A9VGL2|A9VGL2_BACMK
MYDFIIIGGGIVGLSTGMALTKKFPRAKIAIIEKEKELAHHQTGHNSGVIHSGIYYKPGSYKAKFAKEGNAAMVQFCKENDIAYDMCGKVIVATEKDELPLLHNLYERGLQNDLHIAKIDKEELVEIEPHVKGLEAIRVPSCGIADYRGVSYAFARLIQESGGEIHLGTTAERITEKKDAVTIETNKGTFKTKFLINCAGLHSDRIAKKTGILTDMKIVPFRGEYYELVPEKRHLVKHLIYPVPNPEFPFLGVHFTRMINGDVHAGPNAVLSFKREGYTKTDFDIKDFMETMTYTGFWKMAMPNMKEGIKEMVRSFSKQSFLKSLQRLIPELTEKDIVPTHAGVRAQAILSNGNMVDDFCIIPGINSLHICNAPSPAATASIKIGEEIAKQVPDVVAVRV

SEQ ID NO: 1573 - protein, 392 aa, Clostridium acetobutylicum
  source 1..392: note = Clostridium acetobutylicum_Acetyl-CoA acetyltransferase; sp|P45359|THLA_CLOAB
MKEVVIASAVRTAIGSYGKSLKDVPAVDLGATAIKEAVKKAGIKPEDVNEVILGNVLQAGLGQNPARQASFKAGLPVEIPAMTINKVCGSGLRTVSLAAQIIKAGDADVIIAGGMENMSRAPYLANNARWGYRMGNAKFVDEMITDGLWDAFNDYHMGITAENIAERWNISREEQDEFALASQKKAEEAIKSGQFKDEIVPVVIKGRKGETVVDTDEHPRFGSTIEGLAKLKPAFKKDGTVTAGNASGLNDCAAVLVIMSAEKAKELGVKPLAKIVSYGSAGVDPAIMGYGPFYATKAAIEKAGWTVDELDLIESNEAFAAQSLAVAKDLKFDMNKVNVNGGAIALGHPIGASGARILVTLVHAMQKRDAKKGLATLCIGGGQGTAILLEKC

SEQ ID NO: 1574 - protein, 282 aa, Clostridium acetobutylicum
  source 1..282: note = Clostridium acetobutylicum_3-hydroxybutyryl-CoA dehydrogenase; sp|P52041|HBD_CLOAB
MKKVCVIGAGTMGSGIAQAFAAKGFEVVLRDIKDEFVDRGLDFINKNLSKLVKKGKIEEATKVEILTRISGTVDLNMAADCDLVIEAAVERMDIKKQIFADLDNICKPETILASNTSSLSITEVASATKRPDKVIGMHFFNPAPVMKLVEVIRGIATSQETFDAVKETSIAIGKDPVEVAEAPGFVVNRILIPMINEAVGILAEGIASVEDIDKAMKLGANHPMGPLELGDFIGLDICLAIMDVLYSETGDSKYRPHTLLKKYVRAGWLGRKSGKGFYDYSK

SEQ ID NO: 1575 - protein, 261 aa, Clostridium acetobutylicum
  source 1..261: note = Clostridium acetobutylicum_Short-chain-enoyl-CoA hydratase ; sp|P52046|CRT_CLOAB
MELNNVILEKEGKVAVVTINRPKALNALNSDTLKEMDYVIGEIENDSEVLAVILTGAGEKSFVAGADISEMKEMNTIEGRKFGILGNKVFRRLELLEKPVIAAVNGFALGGGCEIAMSCDIRIASSNARFGQPEVGLGITPGFGGTQRLSRLVGMGMAKQLIFTAQNIKADEALRIGLVNKVVEPSELMNTAKEIANKIVSNAPVAVKLSKQAINRGMQCDIDTALAFESEAFGECFSTEDQKDAMTAFIEKRKIEGFKNR

SEQ ID NO: 1576 - protein, 379 aa, Clostridium acetobutylicum
  source 1..379: note = Clostridium acetobutylicum _butyryl-CoA dehydrogenase (Acyl-CoA dehydrogenase); sp|P52042|ACDS_CLOAB
MDFNLTREQELVRQMVREFAENEVKPIAAEIDETERFPMENVKKMGQYGMMGIPFSKEYGGAGGDVLSYIIAVEELSKVCGTTGVILSAHTSLCASLINEHGTEEQKQKYLVPLAKGEKIGAYGLTEPNAGTDSGAQQTVAVLEGDHYVINGSKIFITNGGVADTFVIFAMTDRTKGTKGISAFIIEKGFKGFSIGKVEQKLGIRASSTTELVFEDMIVPVENMIGKEGKGFPIAMKTLDGGRIGIAAQALGIAEGAFNEARAYMKERKQFGRSLDKFQGLAWMMADMDVAIESARYLVYKAAYLKQAGLPYTVDAARAKLHAANVAMDVTTKAVQLFGGYGYTKDYPVERMMRDAKITEIYEGTSEVQKLVISGKIFR

SEQ ID NO: 1577 - protein, 414 aa, Acetoanaerobium sticklandii
  source 1..414: note = Acetoanaerobium sticklandii _lysine-2,3-aminomutase; sp|E3PRJ8|KAMA_ACESD
MSLKDKFFSHVSQEDWNDWKWQVRNRIETVEELKKYIPLTPEEEEGVKRCLDTLRMAITPYYLSLIDVENPNDPVRKQAVPLSLELHRAASDQEDPLHEDGDSPVPGLTHRYPDRVLLLMTDQCSMYCRHCTRRRFAGQTDSAVDTKQIDAAIEYIKNTPQVRDVLLSGGDALLISDEKLEYTIKRLREIPHVEVIRIGSRVPVVMPQRITPELVSMLKKYHPVWLNTHFNHPNEITEESKRACELLADAGIPLGNQSVLLAGVNDCMHVMKKLVNDLVKIRVRPYYIYQCDLSVGIEHFRTPVAKGIEIIEGLRGHTSGYCVPTFVVDAPGGGGKTPVMPNYVISQNHNKVILRNFEGVITTYDEPDHYTFHCDCDVCTGKTNVHKVGVAGLLNGETATLEPEGLERKQRGHH

SEQ ID NO: 1578 - protein, 519 aa, Acetoanaerobium sticklandii
  source 1..519: note = Acetoanaerobium sticklandii _lysine- 5,6-aminomutase (, subunits); sp|E3PRJ5|KAMD_ACESD
MISVESKLNLDFNLVEKARAKAKAIAIDTQEFIEKHTTVTVERAVCRLLGIDGVDTDEVPLPNIVVDHIKENNGLNLGAAMYIANAVLNTGKTPQEIAQAISAGELDLTKLPMKDLFEVKTKALSMAKETVEKIKNNRSIRESRFEEYGDKSGPLLYVIVATGNIYEDITQAVAAAKQGADVIAVIRTTGQSLLDYVPYGATTEGFGGTYATQENFRLMREALDKVGAEVGKYIRLCNYCSGLCMPEIAAMGAIERLDVMLNDALYGILFRDINMQRTMIDQNFSRIINGFAGVIINTGEDNYLTTADAFEEAHTVLASQFINEQFALLAGLPEEQMGLGHAFEMDPELKNGFLYELSQAQMAREIFPKAPLKYMPPTKFMTGNIFKGHIQDALFNMVTIMTNQRIHLLGMLTEALHTPFMSDRALSIENAQYIFNNMESISEEIQFKEDGLIQKRAGFVLEKANELLEEIEQLGLFDTLEKGIFGGVKRPKDGGKGLNGVVSKDENYYNPFVELMLNK

SEQ ID NO: 1579 - protein, 344 aa, Acetoanaerobium sticklandii
  source 1..344: note = Acetoanaerobium sticklandii _ L-erythro- 3,5-diaminohexanoate dehydrogenase; sp|E3PRJ9|KDD_ACESD
MKGCKYGTHRVIEPKGSLPQPALKISNDMNIFSNEILIDVQALNVDSASFTQIEEEAGHDTKKIAAKILEIVGERGKMQNPVTGSGGMLIGTIEKIGEDLEGKIDLKVGDKIATLVSLSLTPLQIDEIIDIKPDIDRVEIKGKAILFESGIYAKLPTDMSETLALAALDVAGAPAQTAKLVKPGDSVLILGAAGKSGMMCCYEAKKRVGPTGRVVGLVRNEKSKAKLLEMGIVDDVIIASAQLPVEVLETSLAANNGNEYDISINCVNVENTEMSSILPIRNGGTVYFFSMATSFTKAALGAEGVGKDVDMIIGNGYTKGHAEITLQILRESEIVRTTFEKMYL

SEQ ID NO: 1580 - protein, 273 aa, Acetoanaerobium sticklandii
  source 1..273: note = Acetoanaerobium sticklandii _3-keto-5-aminohexanoate cleavage enzyme; sp|E3PRK0|KCE_ACESD
MEKLIITAAICGAEVTKEHNPNVPYTVEEIVREAKSAYDAGASVIHLHVREDDGTPTQSKERFKMCVDAIKEACPDAIIQPSTGGAVGMTDEERLQPVFLKPEMASLDCGTCNFGGDEIFVNTENMIINFSKYMIKNGVKPECEVFDKSMIDMAIRLAKKGHIQTPMHFNFVMGVNGGISATPRDLVFLIGSIPSESSFTVSAMGRNQFPMAAMAIITGGHVRVGFEDNVYIEKGVPAKSNGELVEKVVRLAKEFGRPVATPSEAREILGISK

SEQ ID NO: 1581 - protein, 126 aa, Clostridium acetobutylicum
  source 1..126: note = Clostridium acetobutylicum_3-aminobutyryl- CoA ammonia lyase; sp|E3PRK1|KAL_ACESD
MKSVLKIRMSAHDAHYGGGLVDGARMLQLFGDVATELLIMNDGDEGLFKAYDMVEFMAPVFAGDYIEVEGSITEQGNTSRKMIFEARKVIVPRTDINDSACDVLETPIVVCRASGTCVVPKDKQRK

SEQ ID NO: 1582 - protein, 371 aa, Clostridium kluyveri
  source 1..371: note = Clostridium kluyveri _4-hydroxybutyrate dehydrogenase (NAD-dependent 4-hydroxybutyrate dehydrogenase); sp|P38945|4HDB_CLOK5
MKLLKLAPDVYKFDTAEEFMKYFKVGKGDFILTNEFLYKPFLEKFNDGADAVFQEKYGLGEPSDEMINNIIKDIGDKQYNRIIAVGGGSVIDIAKILSLKYTDDSLDLFEGKVPLVKNKELIIVPTTCGTGSEVTNVSVAELKRRHTKKGIASDELYATYAVLVPEFIKGLPYKFFVTSSVDALIHATEAYVSPNANPYTDMFSVKAMELILNGYMQMVEKGNDYRVEIIEDFVIGSNYAGIAFGNAGVGAVHALSYPIGGNYHVPHGEANYLFFTEIFKTYYEKNPNGKIKDVNKLLAGILKCDESEAYDSLSQLLDKLLSRKPLREYGMKEEEIETFADSVIEGQQRLLVNNYEPFSREDIVNTYKKLY

SEQ ID NO: 1583 - protein, 490 aa, Clostridium aminobutyricum
  source 1..490: note = Clostridium aminobutyricum_4-hydroxybutyryl-CoA dehydratase; sp|P55792|HDVD_CLOAM
MLMTAEQYIESLRKLNTRVYMFGEKIENWVDHPMIRPSINCVAMTYELAQDPQYADLMTTKSNLIGKTINRFANLHQSTDDLRKKVKMQRLLGQKTASCFQRCVGMDAFNAVFSTTYEIDQKYGTNYHKNFTEYLKYIQENDLIVDGAMTDPKGDRGLAPSAQKDPDLFLRIVEKREDGIVVRGAKAHQTGSINSHEHIIMPTIAMTEADKDYAVSFACPSDADGLFMIYGRQSCDTRKMEEGADIDLGNKQFGGQEALVVFDNVFIPNDRIFLCQEYDFAGMMVERFAGYHRQSYGGCKVGVGDVVIGAAALAADYNGAQKASHVKDKLIEMTHLNETLYCCGIACSAEGYPTAAGNYQIDLLLANVCKQNITRFPYEIVRLAEDIAGGLMVTMPSEADFKSETVVGRDGETIGDFCNKFFAAAPTCTTEERMRVLRFLENICLGASAVGYRTESMHGAGSPQAQRIMIARQGNINAKKELAKAIAGIK

SEQ ID NO: 1584 - protein, 262 aa, Acetoanaerobium sticklandii
  source 1..262: note = Acetoanaerobium sticklandii (strain ATCC 12662 / DSM 519 / JCM 1433 / NCIMB 10654)_Lysine 5,6-aminomutase beta subunit; sp|E3PRJ4|KAME_ACESD Lysine 5,6-aminomutase beta subunit OS=Acetoanaerobium sticklandii (strain ATCC 12662 / DSM 519 / JCM 1433 / NCIMB 10654) OX=499177 GN=kamE PE=1; SV = 1
MSSGLYSMEKKEFDKVLDLERVKPYGDTMNDGKVQLSFTLPLKNNERSAEAAKQIALKMGLEEPSVVMQQSLDEEFTFFVVYGNFVQSVNYNEIHVEAVNSEILSMEETDEYIKENIGRKIVVVGASTGTDAHTVGIDAIMNMKGYAGHYGLERYEMIDAYNLGSQVANEDFIKKAVELEADVLLVSQTVTQKNVHIQNMTHLIELLEAEGLRDRFVLLCGGPRINNEIAKELGYDAGFGPGRFADDVATFAVKTLNDRMNS

SEQ ID NO: 1585 - protein, 301 aa, Clostridium acetobutylicum
  source 1..301: note = Clostridium acetobutylicum (strain ATCC 824 / DSM 792 / JCM 1419 / LMG 5710 / VKM B-1787)_Phosphate butyryltransferase; sp|P58255|PTB_CLOAB Phosphate butyryltransferase OS=Clostridium acetobutylicum (strain ATCC 824 / DSM 792 / JCM 1419 / LMG 5710 / VKM B-1787); OX = 272562 GN=ptb PE=3 SV=1
MIKSFNEIIMKVKSKEMKKVAVAVAQDEPVLEAVRDAKKNGIADAILVGDHDEIVSIALKIGMDVNDFEIVNEPNVKKAALKAVELVSTGKADMVMKGLVNTATFLRSVLNKEVGLRTGKTMSHVAVFETEKFDRLLFLTDVAFNTYPELKEKIDIVNNSVKVAHAIGIENPKVAPICAVEVINPKMPSTLDAAMLSKMSDRGQIKGCVVDGPLALDIALSEEAAHHKGVTGEVAGKADIFLMPNIETGNVMYKTLTYTTDSKNGGILVGTSAPVVLTSRADSHETKMNSIALAALVAGNK

SEQ ID NO: 1586 - protein, 355 aa, Clostridium acetobutylicum
  source 1..355: note = Clostridium acetobutylicum (strain ATCC 824 / DSM 792 / JCM 1419 / LMG 5710 / VKM B-1787)_Butyrate kinase 1; sp|Q45829|BUK1_CLOAB Butyrate kinase 1 OS=Clostridium acetobutylicum (strain ATCC 824 / DSM 792 / JCM 1419 / LMG 5710 / VKM B-1787) OX=272562 GN=buk1 PE=3 SV=2
MYRLLIINPGSTSTKIGIYDDEKEIFEKTLRHSAEEIEKYNTIFDQFQFRKNVILDALKEANIEVSSLNAVVGRGGLLKPIVSGTYAVNQKMLEDLKVGVQGQHASNLGGIIANEIAKEINVPAYIVDPVVVDELDEVSRISGMADIPRKSIFHALNQKAVARRYAKEVGKKYEDLNLIVVHMGGGTSVGTHKDGRVIEVNNTLDGEGPFSPERSGGVPIGDLVRLCFSNKYTYEEVMKKINGKGGVVSYLNTIDFKAVVDKALEGDKKCALIYEAFTFQVAKEIGKCSTVLKGNVDAIILTGGIAYNEHVCNAIEDRVKFIAPVVRYGGEDELLALAEGGLRVLRGEEKAKEYK

SEQ ID NO: 1587 - protein, 356 aa, Clostridium acetobutylicum
  source 1..356: note = Clostridium acetobutylicum (strain ATCC 824 / DSM 792 / JCM 1419 / LMG 5710 / VKM B-1787)_Butyrate kinase 2; sp|Q97II1|BUK2_CLOAB Butyrate kinase 2 OS=Clostridium acetobutylicum (strain ATCC 824 / DSM 792 / JCM 1419 / LMG 5710 / VKM B-1787) OX=272562 GN=buk2 PE=1 SV=1
MKFKLLTINPGSTSTKIAVFENEKEILSETLRHSSKELEAYKNIYEQFEFRKDTILKVLKDKNFNIQNIDAVVGRGGLLKPIVGGTYKVNEKMLKDLKAGVQGEHASNLGGIIANSIAEAFGVSAYIVDPVVVDEMEDIARFSGIPELPRKSIFHALNQKAVAKRYAKESERDYEDLNIIVAHMGGGVSVGAHKNGKIIDVNNALDGEGAFSPERSGNLPSGDLVRLCFSGKYTEDEILKKITGKGGFVAYHGTNNALDVQNAALEGDYDAKMTYNAMGYQVAKDIGSAAAVLDGKVDCIILTGGIAYNKLMTDFIAKKVSFIAPITIYPGEDEMLALAEGTLRVLSGQEEAKKYK

SEQ ID NO: 1588 - protein, 588 aa, Clostridium sp.
  source 1..588: note = Clostridium sp._glutaconyl-CoA decarboxylase subunit alpha; MBS6375426.1 glutaconyl-CoA decarboxylase subunit alpha [Clostridium sp.]
MNMYSMPGYFQNMPIIGKSLVNQNPENEESLKAVEQDIHESIEKVLAAGITSEEKLNERGQLSAMQRINALIDAGTWCPLNSLFNPEDNRFGTTNIVNGLGRVDGKWVYIVASDNKKMAGAWVPGQAENLLRASDTAKMLHLPLVYLLNCSGVEFPNQDKVYPNRRGGGTPFFRNSELNQLGVPVIVGIYGTNPAGGGYHSISPTVLIAHQDANMAVGGAGILSGMNPKGFIDEETAEGIIAAQIENSKHHVPAPGSVPIHYDETGFFREVYENDLGVIEGIKKYISYLPAYNLEFFRVDTPKAPQFPAEDLYSIVPMNQKRPYDMYEVIARLFDNSEFAEYKKGYGPEMITGLAKVNGLLVGVVANVQGLLMNYPEYKQNSVGIGGKLYRQGLIKMNEFVTLCARDRIPLIWLQDTTGIDVGDEAEKAELLGLGQSLIYSIENSKLPSLEVTIRKASAAAHYVLGGPQGNNTNVFSLGTGACEYYVMPGETAANAMYSRKLVKAKKAGEPLQPIIDKMNDMINMYTEKSRPKYCTKTGMVDEIVDMTDIRPYIQAFTEAAYQNPQSICPFHQMITPRAIREFETFKK

SEQ ID NO: 1589 - protein, 218 aa, Clostridium acetobutylicum
  source 1..218: note = Clostridium acetobutylicum_Butyrate--acetoacetate CoA-transferase subunit A; sp|P33752|CTFA_CLOAB Butyrate--acetoacetate CoA-transferase subunit A; OS = Clostridium acetobutylicum OX=272562 GN=ctfA PE=1 SV=1
MNSKIIRFENLRSFFKDGMTIMIGGFLNCGTPTKLIDFLVNLNIKNLTIISNDTCYPNTGIGKLISNNQVKKLIASYIGSNPDTGKKLFNNELEVELSPQGTLVERIRAGGSGLGGVLTKTGLGTLIEKGKKKISINGTEYLLELPLTADVALIKGSIVDEAGNTFYKGTTKNFNPYMAMAAKTVIVEAENLVSCEKLEKEKAMTPGVLINYIVKEPA

SEQ ID NO: 1590 - protein, 221 aa, Clostridium acetobutylicum
  source 1..221: note = Clostridium acetobutylicum_Butyrate--acetoacetate CoA-transferase subunit B; sp|P23673|CTFB_CLOAB Butyrate--acetoacetate CoA-transferase subunit B; OS = Clostridium acetobutylicum OX=272562 GN=ctfB PE=1 SV=1
MINDKNLAKEIIAKRVARELKNGQLVNLGVGLPTMVADYIPKNFKITFQSENGIVGMGASPKINEADKDVVNAGGDYTTVLPDGTFFDSSVSFSLIRGGHVDVTVLGALQVDEKGNIANWIVPGKMLSGMGGAMDLVNGAKKVIIAMRHTNKGQPKILKKCTLPLTAKSQANLIVTELGVIEVINDGLLLTEINKNTTIDEIRSLTAADLLISNELRPMAV

SEQ ID NO: 1591 - protein, 557 aa, Pseudomonas savastanoi
  source 1..557: note = Pseudomonas savastanoi_Tryptophan-2-monooxygenase; sp|P06617|TR2M_PSESS
MYDHFNSPSIDILYDYGPFLKKCEMTGGIGSYSAGTPTPRVAIVGAGISGLVAATELLRAGVKDVVLYESRDRIGGRVWSQVFDQTRPRYIAEMGAMRFPPSATGLFHYLKKFGISTSTTFPDPGVVDTELHYRGKRYHWPAGKKPPELFRRVYEGWQSLLSEGYLLEGGSLVAPLDITAMLKSGRLEEAAIAWQGWLNVFRDCSFYNAIVCIFTGRHPPGGDRWARPEDFELFGSLGIGSGGFLPVFQAGFTEILRMVINGYQSDQRLIPDGISSLAARLADQSFDGKALRDRVCFSRVGRISREAEKIIIQTEAGEQRVFDRVIVTSSNRAMQMIHCLTDSESFLSRDVARAVRETHLTGSSKLFILTRTKFWIKNKLPTTIQSDGLVRGVYCLDYQPDEPEGHGVVLLSYTWEDDAQKMLAMPDKKTRCQVLVDDLAAIHPTFASYLLPVDGDYERYVLHHDWLTDPHSAGAFKLNYPGEDVYSQRLFFQPMTANSPNKDTGLYLAGCSCSFAGGWIEGAVQTALNSACAVLRSTGGQLSKGNPLDCINASYRY

SEQ ID NO: 1592 - protein, 455 aa, Pseudomonas savastanoi
  source 1..455: note = Pseudomonas savastanoi _Indoleacetamide hydrolase (Acetamidase); sp|P06618|HYIN_PSESS
MHEIITLESLCQALADGEIAAAELRERALDTEARLARLNCFIREGDAVSQFGEADHAMKGTPLWGMPVSFKDNICVRGLPLTAGTRGMSGFVSDQDAAIVSQLRALGAVVAGKNNMHELSFGVTSINPHWGTVGNPVAPGYCAGGSSGGSAAAVASGIVPLSVGTDTGGSIRIPAAFCGITGFRPTTGRWSTAGIIPVSHTKDCVGLLTRTAGDAGFLYGLLSGKQQSFPLSRTAPCRIGLPVSMWSDLDGEVERACVNALSLLRKTGFEFIEIDDADIVELNQTLTFTVPLYEFFADLAQSLLSLGWKHGIHHIFAQVDDANVKGIINHHLGEGAIKPAHYLSSLQNGELLKRKMDELFARHNIELLGYPTVPCRVPHLDHADRPEFFSQAIRNTDLASNAMLPSITIPVGPEGRLPVGLSFDALRGRDALLLSRVSAIEQVLGFVRKVLPHTT

SEQ ID NO: 1593 - protein, 549 aa, Clostridium thermobutyricum
  source 1..549: note = Clostridium thermobutyricum _Indole-3-pyruvate decarboxylase; tr|A0A1V4SV36|A0A1V4SV36_9CLOT
MKTTVGNYLIDSLKEYGVKHIFGVPGDYNLSFLDQIDDSEDIEWIGNCNELNASYAADGYGRIKGMAAIATTFGVGELSAVNGIAGSYAENVPVVKIVGIPSSKVVENRKLVHHTLGDGEFYRFNEMFKEVSVAQTILNEINAKEEIDRVLRECYLYKKPVYIGMPVDLATKVINVSEKTSYNLESDKNSLNSFISNVKSLMSNSKKQMILADFEVNRYNLNKELQEFVEASNLPVSSLAMGKGVIDETHPNFVGVYSGSLSNENITKLVKSCDLAFLIGVKLTDSITAGFSYINKNITLVEVHPLYCRIGENLFSNILMKDALESLKNLNVEFSKNDTPHVSLINNFEATNTPLTQKRFFQGIESFLNENDILIAEQGTSFFGSCLVNMKKGCTFIGQPLWGSIGYTVGALLGTQIADRNRRNILLVGDGSFQLTAQEVSTMIRENLSPIIMVINNDGYTVERLIHGPNRKYNDINMWDYSKLVSVFDLEGNRSISFKAKTEIELMNALKEADNNKDKLTFIEVCMDKMDSPQLLKDLGELFSKQNSY

SEQ ID NO: 1594 - protein, 862 aa, Clostridium acetobutylicum
  source 1..862: note = Clostridium acetobutylicum_aldehyde dehydrogenase; sp|P33744|ADHE_CLOAB
MKVTTVKELDEKLKVIKEAQKKFSCYSQEMVDEIFRNAAMAAIDARIELAKAAVLETGMGLVEDKVIKNHFAGEYIYNKYKDEKTCGIIERNEPYGITKIAEPIGVVAAIIPVTNPTSTTIFKSLISLKTRNGIFFSPHPRAKKSTILAAKTILDAAVKSGAPENIIGWIDEPSIELTQYLMQKADITLATGGPSLVKSAYSSGKPAIGVGPGNTPVIIDESAHIKMAVSSIILSKTYDNGVICASEQSVIVLKSIYNKVKDEFQERGAYIIKKNELDKVREVIFKDGSVNPKIVGQSAYTIAAMAGIKVPKTTRILIGEVTSLGEEEPFAHEKLSPVLAMYEADNFDDALKKAVTLINLGGLGHTSGIYADEIKARDKIDRFSSAMKTVRTFVNIPTSQGASGDLYNFRIPPSFTLGCGFWGGNSVSENVGPKHLLNIKTVAERRENMLWFRVPHKVYFKFGCLQFALKDLKDLKKKRAFIVTDSDPYNLNYVDSIIKILEHLDIDFKVFNKVGREADLKTIKKATEEMSSFMPDTIIALGGTPEMSSAKLMWVLYEHPEVKFEDLAIKFMDIRKRIYTFPKLGKKAMLVAITTSAGSGSEVTPFALVTDNNTGNKYMLADYEMTPNMAIVDAELMMKMPKGLTAYSGIDALVNSIEAYTSVYASEYTNGLALEAIRLIFKYLPEAYKNGRTNEKAREKMAHASTMAGMASANAFLGLCHSMAIKLSSEHNIPSGIANALLIEEVIKFNAVDNPVKQAPCPQYKYPNTIFRYARIADYIKLGGNTDEEKVDLLINKIHELKKALNIPTSIKDAGVLEENFYSSLDRISELALDDQCTGANPRFPLTSEIKEMYINCFKKQP

SEQ ID NO: 1595 - protein, 417 aa, Clostridium sporogenes
  source 1..417: note = Clostridium sporogenes_tryptophan decarboxylase; sp|J7SZ64|TRPDC_CLOS1
MKFWRKYTQQEMDEKITESLEKTLNYDNTKTIGIPGTKLDDTVFYDDHSFVKHSPYLRTFIQNPNHIGCHTYDKADILFGGTFDIERELIQLLAIDVLNGNDEEFDGYVTQGGTEANIQAMWVYRNYFKKERKAKHEEIAIITSADTHYSAYKGSDLLNIDIIKVPVDFYSRKIQENTLDSIVKEAKEIGKKYFIVISNMGTTMFGSVDDPDLYANIFDKYNLEYKIHVDGAFGGFIYPIDNKECKTDFSNKNVSSITLDGHKMLQAPYGTGIFVSRKNLIHNTLTKEATYIENLDVTLSGSRSGSNAVAIWMVLASYGPYGWMEKINKLRNRTKWLCKQLNDMRIKYYKEDSMNIVTIEEQYVNKEIAEKYFLVPEVHNPTNNWYKIVVMEHVELDILNSLVYDLRKFNKEHLKAM

SEQ ID NO: 1596 - protein, 578 aa, Clostridium beijerinckii
  source 1..578: note = Clostridium beijerinckii _Amine oxidase; tr|A0A1S8P370|A0A1S8P370_CLOBE
MNSYNNSNSPYQIDNPGECERHTMLEYILKLQNRLDDLENIIDLMSPPEEITNICPIGIAKDTKVAVIGAGEAGLAAAFELRKTGCNITLFEASQRIGGRVYTHYFDRNKKYYGELGPMSIPISHETTWHYINLFKLHTSPFVNNNDNALLYVRNERAVNDAKGKSVENNIYSKFNLSETEKKQIWFEFYGKIYEKYLKSLPTEVRRELIQVKAEYSDSIIDIDKLSYRNACKNMDVSQDFITMLGCLGGKEQFFNLSLTEMLQQYYTADFEYNYRITEGMINLPHSLYEALCDRNEEAYNGISKEQLGKIEIKMGFPICGIYNDSTKDKIILKYIDNRDNRKTSEEFDYVICAIPFSSLRRIEIEPLFTTKKIQAINEMNNETSHKIYLFLKERFWEMGNASKKIIGGCSFTDLPLTSIYYPSDHSKAVVNKYGKWVLKPGVTPNEEGVLLASYTWCQEAMRLGNESPELLIDDVIRYIEKVHGLTPHYLDDKVIDYKSLIWSDVQYIWTAGALSKPEDKTLFSYDVTVPEMENRVFFAGEHISQKHVSQQGALQTGMIAANEIAKQIKGKLNKENN

SEQ ID NO: 1597 - protein, 327 aa, Clostridium saccharobutylicum
  source 1..327: note = Clostridium saccharobutylicum_Nitrilase; tr|U5MV39|U5MV39_CLOSA
MSKQYPKFKAAAVQAAPVYLDLDATVEKSCKLIDEAASNGAKLVAFPEAFIPGYPWFAFIGHPEYTRKFYHELYKNAVEIPSLAIQKISEAAKRNKTYVCISCSEKDGGSLYLAQLWFNPDGDLIGKHRKMRASVAERLIWGDGSGSLMPVFETEIGNLGGCMCWEHQVPLDLLAMNSQNEQVHVASWPGYFDDEISSRYYAISTQTFVLMTSSIYSEEMKDMICLTPEQREYFDTFKSGHTCIYGPDGEPISEMIPAETEGIAYAEIDVEKIIDFKYYIDPAGHYSNQSLSMNFNQNPTPVVRKFGESKNKVISYEEINLSVGSEE

SEQ ID NO: 1598 - protein, 472 aa, Clostridium tetani
  source 1..472: note = Clostridium tetani (strain Massachusetts / E88)_Tryptophanase; sp|Q894M8|TNAA_CLOTE
MIIYYLKLEGFNMKIKYVAEPFRIKMVEPIKMLTREERELKIAEAKYNTFNLRGEDVYIDLLTDSGTNAMSDDQWAGVMKGDEAYAGGKSYFKLVDAVKDIFGYKFVQPVHQGRAAEKVLFGLLLGEGKYSISNMHFDTTRAHVELSGARAIDCVVPEASDPTVRIPFKGNMDVEKLEKLIKEHGADKIGVVVMTITNNSAGGQPVSIENMKETAEICKKYNIRLCIDAARYAENAYFIKQREPGYENKSIKEIIKEIFSYADIFTMSAKKDAIVNMGGLLGIKEDEELFQLCKGRTISFEGFITYGGLSGRDLESLAIGLYEGIDENYLRYRIGQMEYLAARLDEAGIAYQSPVGGHGVFVDAKSMFPHIPYNEFPGQVLAVELYKEAGIRTCEIGSYMLGNDPDTGEQLKADFEFTRLAIARRVYTQAHIDIMADALITIKERANTVKGYRITWEPPILRHFQASLEPLK

SEQ ID NO: 1599 - protein, 462 aa, Citrobacter koseri [sequence omitted]

SEQ ID NO: 1600 - protein, 471 aa, Shigella boydii
  source 1..471: note = Shigella boydii serotype 18 (strain CDC 3083-94 / BS512)_Tryptophanase; sp|B2TUR7|TNAA_SHIB3
MENFKHLPEPFRIRVIEPVKRTTRAYREEAIIKSGMNPFLLDREDVFIDLLTDSGTGAVTQSMQAAMMRGDEAYSGSRSYYALAESVKNIFGYQYTIPTHQGRGAEQIYIPVLIKKREQEKGLDRSKMVAFSNYFFDTTQGHSQINGCTVRNVYIKEAFDTGVRYDFKGNFDLEGLERGIEEVGPNNVPYIVATITSNSAGGQPVSLANLKAMYSIAKKYDIPVVMDSARFAENAYFIKQREAEYKDWTIEQITRETYKYADMLAMSAKKDAMVPMGGLLCMKDDSFFDVYTECRTLCVVQEGFPTYGGLEGGAMERLAVGLYDGMNLDWLAYRIAQVQYLVDGLEEIGVVCQQAGGHAAFVDAGKLLPHIPADQFPAQALACELYKVAGIRAVEIGSFLLGRDPKTGKQLPCPAELLRLTIPRATYTQTHMDFIIEAFKHVKENAANIKGLTFTYEPKVLRHFTAKLKEV

SEQ ID NO: 1601 - protein, 471 aa, Escherichia coli
  source 1..471: note = Escherichia coli (strain K12)_Tryptophanase; sp|P0A853|TNAA_ECOLI
MENFKHLPEPFRIRVIEPVKRTTRAYREEAIIKSGMNPFLLDSEDVFIDLLTDSGTGAVTQSMQAAMMRGDEAYSGSRSYYALAESVKNIFGYQYTIPTHQGRGAEQIYIPVLIKKREQEKGLDRSKMVAFSNYFFDTTQGHSQINGCTVRNVYIKEAFDTGVRYDFKGNFDLEGLERGIEEVGPNNVPYIVATITSNSAGGQPVSLANLKAMYSIAKKYDIPVVMDSARFAENAYFIKQREAEYKDWTIEQITRETYKYADMLAMSAKKDAMVPMGGLLCMKDDSFFDVYTECRTLCVVQEGFPTYGGLEGGAMERLAVGLYDGMNLDWLAYRIAQVQYLVDGLEEIGVVCQQAGGHAAFVDAGKLLPHIPADQFPAQALACELYKVAGIRAVEIGSFLLGRDPKTGKQLPCPAELLRLTIPRATYTQTHMDFIIEAFKHVKENAANIKGLTFTYEPKVLRHFTAKLKEV

SEQ ID NO: 1602 - protein, 473 aa, Vibrio vulnificus
  source 1..473: note = Vibrio vulnificus (strain CMCP6)_Tryptophanase; sp|Q8D5Q4|TNAA_VIBVU
MDNFKHLPEPFRIRVIEPVKRTTREYREEAILKAGMNPFLLDSEDVFIDLLTDSGTGAITQDMQAAMFRGDEAYSGSRSYHALANAVKDIFGYEFTIPTHQGRGAEQIYIPVLIKKREIEKGLDRSKMVALSNYFFDTTQGHTQINCCVAKNVYTEEAFDTGVKADFKGNFDLEKLEEAILEAGPANVPYIVSTITCNSAGGQPVSLANLKAVYEIAKRYDIPVIMDSARFAENAYFIQQREKDYQNWSIEEITRESYKYADGLAMSAKKDAMVQMGGLLCFKDESFLDVYTECRTLCVVQEGFPTYGGLEGGAMERLAVGLYDGMRQDWLAYRINQVEYLVNGLESIGVVCQQAGGHAAFVDAGKLLPHIPADQFPAHALACELYKVAGIRAVEIGSLLLGRDPATGKQHPCPAELLRLTIPRATYTQTHMDFIIEAFGKVKANAANVKGLEFTYEPQVLRHFTARLKEIDA

SEQ ID NO: 1603 - protein, 454 aa, Symbiobacterium thermophilum
  source 1..454: note = Symbiobacterium thermophilum (strain T / IAM 14863)_Tryptophanase; sp|P31014|TNAA1_SYMTH
MPKGEPFKIKMVEPIRLIPREDRERALKEAHYNPFFLRSSDVYIDLLTDSGTGAMSQFQWSAMMLGDESYAGASSYYRLKETVTDITGYEYVIPTHQGRGAEKVAFSQLITRPGMYVLSNMFFDTTRGHVQLAGGRPVDLLIDVPTEEYHPFKGNMDTERLEQFIREHGAENIACIVMTVTNNSAGGQPVSMANIRETYQIARKYGVLVLFDVARYAENCHFIRMREEGYADKHPIDIAREMFSYGDGLMMSAKKDALVNIGGLLAFRDEELFTKVGAAVVPFEGFLTYGGLAGRDLEAMAVGLREALDPDYLAYRVGQVQYLGEMLRNAGIPIQWPVGGHAVFIDAAKFLPHVPWDQFPGHALTLALYLEGGVRTVEVGSLMIGRDPETGENVRGPFEFTRLAIPRRVYTNLHLEDVAETVINAFQKREEIRGVKFAREPKVLRHFTAWFDPA

SEQ ID NO: 1604 - protein, 493 aa, Clostridium tertium
  source 1..493: note = Clostridium tertium_Aldehyde dehydrogenase AldA; tr|A0A6N2YVH1|A0A6N2YVH1_9CLOT
MNIKIQEKYQLYIGGEWKDSSDGTTIKTYNPANGQLLSEIADATEKDVDDAVKAAKKAFQTWGKTTPTERAIILNKIADIIDDNAEYLATIETMDNGKPIRETTGADIPLAADHFRYFAGVIRADEGVASNIDENTLNLILREPIGVVGQIVPWNFPFLMAAWKLAPVLAAGDTSVFKPSSTTSLSVLEFMKLIQDIVPKGVINIITGRGSKSGEYLQHNEGIDKLAFTGSTEVGREIGLSAAKRIIPATLELGGKSANIFFSDADMNMALEGIQLGILFNQGQVCSAGSRIFVQEDFYDEFIEKAVNAFEKVKVGNPLDPNTQMGAQVSEAQLNKILKYIEIGKNEGAKVITGGERFVEGDAKNGYFMKPTLLVDVNNNMRVAREEIFGPVGVVIKFKTEDEVIAMANDSNYGLGGGVFTRDINRAIRVAKSIRTGRVWVNTYNSFPAGATFGGYKESGIGRETHKSILDAYTQKKNIIVNLSEKPGGMYIK

SEQ ID NO: 1605 - protein, 361 aa, Azospirillum brasilense
  source 1..361: note = Azospirillum brasilense_HisC1; AEB97257.1
MELLSPRPGIGQIKPYRPARPPEDGAAWVDLSLTVNPLGPGKKALTAYRHMAAQIHRYPDWSQDRLRHAIARRYDLDAGHITCANGSDEMIHLVTQAFAGPGDEVLCHEHGYRGFMKAIRAAGATPVIAAERDLVVDVEAMIDRANERTKLCFLANPNNPTGTYIPSEMVLRLRAGLPSHTLLVLDSAYADYCRRDNYSDGTAIVENSDNVLMVRTFSKLHGLAGLRVGWAYGPAGVIEAVNQTRGPFNVGIAAQAAAEAAVGDTEHEEATFAHNSAWLPWLSHELEQLGVRVYPSVCNFILARIPTDPSLGVQAVLDHLARRGILVKPTLDYGLADCLRITVGREDENRALVAALGEILS

SEQ ID NO: 1606 - protein, 550 aa, Pantoea agglomerans
  source 1..550: note = Pantoea agglomerans_indolepyruvate decarboxylase; AAB06571.1
MSTFTVGDYLLTRLQEIGIKHLFGVPGDYNLQFLDRVIAHPEISWVGCANELNAAYAADGYARCNGAGALLTTFGVGELSAINGTAGSYAEYLPVIHIVGAPATQAQLQGDCVHHSLGDGDFQHFIRMAAEVSVATALLTADNATAEIDRVIISALQARRPGYLSLAVDVAAMAVQPPAQPLNTHQPASADARRAFRAAAERLLAPAQRVSLLADFLALRWQQQSALAALREQSAIPCASLLMGKGVLDEQQPGYVGTYAGAASAGQVCEQIEQVDAAICVGVRFTDTITAGFTQQFATERLIDLQPFSASVGNERFAPLSMADALSELQPLFEHYGQQWQPAAAIPAAQPAEPTAVISQHAFWQAMQGFLQPGDLILAEQGTAAFGAAALRLPSRAQLVVQPLWGSIGYTLPAAFGAQTANPDRRVILIIGDGSAQLTIQELGSMLRDGQRLIIFLLNNDGYTVERAIHGATQRYNDIAPWNWTALPHALSLQGQAQSWRISETVQLDEVMTRLAAPQWLSLVEVVMLKDDLPPLLRKVTACLNQRNGG

SEQ ID NO: 1607 - protein, 545 aa, Azospirillum baldaniorum
  source 1..545: note = Azospirillum baldaniorum_indole-3-pyruvate decarboxylase; AAC36886.1
MKLAEALLRALKDRGAQAMFGIPGDFALPFFKVAEETQILPLHTLSHEPAVGFAADAAARYSSTLGVAAVTYGAGAFNMVNAVAGAYAEKSPVVVISGAPGTTEGNAGLLLHHQGRTLDTQFQVFKEITVAQARLDDPAKAPAEIARVLGAARALSRPVYLEIPRNMVNAEVEPVGDDPAWPVDRDALAACADEVLAAMRSATSPVLMVCVEVRRYGLEAKVAELAQRLGVPVVTTFMGRGLLADAPTPPLGTYIGVAGDAEITRLVEESDGLFLLGAILSDTNFAVSQRKIDLRKTIHAFDRAVTLGYHTYADIPLAGLVDALLEGLPPSDRTTRGKEPHAYPTGLQADGEPIAPMDIARAVNDRVRAGQEPLLIAADMGDCLFTAMDMIDAGLMAPGYYAGMGFGVPAGIGAQCVSGGKRILTVVGDGAFQMTGWELGNCRRLGIDPIVILFNNASWEMLRTFQPESAFNDLDDWRFADMAAGMGGDGVRVRTRAELKAALDKAFATRGRFQLIEAMIPRGVLSDTLARFVQGQKRLHAAPRE

SEQ ID NO: 1608 - protein, 486 aa, Azospirillum brasilense
  source 1..486: note = Azospirillum brasilense_aldehyde dehydrogenase family protein; WP_040136836.1
MSLPSYDCFIDGQWRPAHSRETLEILDPADGAVLARIARGGASDIDEAVRAAQTALPGWADCVPVQRGRVLHAIARRILEEQDRLARLESQDTGKPLAQAQADAVAAARFFEYYAGVADKVLGSSIPLGPDYADFTVREPLGVTAQIVPWNYPLQIASRGLAPALATGNTVVLKPAELACLSVLELTRICHEEGLPPGVLNVVPGLGQEAGYALAAHPGVNLVVFTGSVATGAQVMRTAADNIVPVLLELGGKSPNIVLADADLDDALPVLLKAAFPNSGQTCSAGSRVLVQRARHRELVDRLAALCHGLKVGPGLQNSDIGPLVSRAQQGKVLDYIAIARDEGAEVITGGTPLPGADLSHGNFVSPTLLDGARPEMRVHREEIFGPVLTILPFDEVEEAAALANATDYGLVAGIWGRDVGATNWLARTVKAGQIFINCYGAGGGVELPFGGYRKSGFGREKGLDALLSYTQVKNICTRIALPRRS

SEQ ID NO: 1609 - protein, 476 aa, Azospirillum sp.
  source 1..476: note = Azospirillum sp. B506_aldehyde dehydrogenase family protein; WP_042703524.1
MDFDTNYRMTIGGDLVDAPASFAVLNPATRERIAEVPDAGKAQFAAAVSAARTAFKSWSLTPLAERQAAVHRIGQAIEANAESFVALLTREQGKPRPGAQWEILGAAHWCRAVAGQSLADEVLVDDGDRRVVTRRTPLGVVGAITPWNFPVLLSIWKIAPALVAGNTIIVKPSPFTPLCMLKLAELCREFLPPGVFSAVTGGDDLGKWMTAHPGIDKIAFTGHTETGKHVMRSAAGTLKRLTLELGGNDPAIVLPDVDPKAIAPQLFWASFQNNAQFCNATKRLYVHESIYDEVLAELVAYTKTVKVGNGADPDSMLGPIQNGPQYEKVCEYIDDCITQGYRFAGGGRVDRDAPGWFVPVTLVDNPPEDSRIVAEEPFGPVLPVLKWRDEADVVARANATRYGLGASVWGRDLDVVQRIAERLEAGTVWCNEIHQYSPDQPFGGHKESGLGCENALDGLAEYTNWQTLTLNVKPAF

SEQ ID NO: 1610 - protein, 366 aa, Cupriavidus necator
  source 1..366: note = Cupriavidus necator (strain ATCC 17699 / DSM 428 / KCTC 22496 / NCIMB 10442 / H16 / Stanier 337)_Alcohol dehydrogenase; sp|Q0KDL6|ADH_CUPNH
MTAMMKAAVFVEPGRIELADKPIPDIGPNDALVRITTTTICGTDVHILKGEYPVAKGLTVGHEPVGIIEKLGSAVTGYREGQRVIAGAICPNFNSYAAQDGVASQDGSYLMASGQCGCHGYKATAGWRFGNMIDGTQAEYVLVPDAQANLTPIPDGLTDEQVLMCPDIMSTGFKGAENANIRIGDTVAVFAQGPIGLCATAGARLCGATTIIAIDGNDHRLEIARKMGADVVLNFRNCDVVDEVMKLTGGRGVDASIEALGTQATFEQSLRVLKPGGTLSSLGVYSSDLTIPLSAFAAGLGDHKINTALCPGGKERMRRLINVIESGRVDLGALVTHQYRLDDIVAAYDLFANQRDGVLKIAIKPH

SEQ ID NO: 1611 - protein, 458 aa, Paenarthrobacter nicotinovorans
  source 1..458: note = Paenarthrobacter nicotinovorans_Aldehyde dehydrogenase; sp|Q8GAK7|ALDH_PAENI
MAIATIDPTTGITLKTFDAHTPEEVENRIARAEAAFRSLQNTSFEERARWMHKAADILESEADEVARLIATEMGKTLTTAKYEALKSATGMRHFADHAQRYLSPETPVPASEVNASNLHVQFDPLGVVLAVMPWNYPLWQAVRFAAPALMAGNTGLLKHASNVPQCALYLGDLFARGGFPEGAFQTLLVEGKDVIPLVDDARIRAVTLTGSVAAGSAIAEAAGRNIKRSVLELGGMDVFIVMPSADIEKAAAQAVIARLQNSGQSCIAAKRFYVHEDVYDRFEHLFVTGMAEAVAGDPLDESTSFGPLATERGRQDVHELVRDAREKGAAVQCGGEIPEGEGWYYPATVLTGVTEDMRIYREECFGPVACLYKVSSLQEAIALSNDSDFGLSSSVWTNDETEATEAARSIEAGGVFINGLTASFPAVPFGGLKDSGYGRELSAYGIREFVNIKTVWTS

SEQ ID NO: 1612 - protein, 445 aa, Bacillus subtilis; identical to SEQ ID NO: 833
  source 1..445: note = Bacillus subtilis (strain 168)_Putative aldehyde dehydrogenase AldX; sp|P46329|ALDH3_BACSU

SEQ ID NO: 1613 - protein, 483 aa, Pseudomonas oleovorans
  source 1..483: note = Pseudomonas oleovorans_Aldehyde dehydrogenase; sp|P12693|ALDH_PSEOL
MTIPISLAKLNSSADTHSALEVFNLQKVASSARRGKFGIAERIAALNLLKETIQRREPEIIAALAADFRKPASEVKLTEIFPVLQEINHAKRNLKDWMKPRRVRAALSVAGTRAGLRYEPKGVCLIIAPWNYPFNLSFGPLVSALAAGNSVVIKPSELTPHTATLIGSIVREAFSVDLVAVVEGDAAVSQELLALPFDHIFFTGSPRVGKLVMEAASKTLASVTLELGGKSPTIIGPTANLPKAARNIVWGKFSNNGQTCIAPDHVFVHRCIAQKFNEILVKEIVRVYGKDFAAQRRSADYCRIVNDQHFNRINKLLTDAKAKGAKILQGGQVDATERLVVPTVLSNVTAAMDINHEEIFGPLLPIIEYDDIDSVIKRVNDGDKPLALYVFSEDKQFVNNIVARTSSGSVGVNLSVVHFLHPNLPFGGVNNSGIGSAHGVYGFRAFSHEKPVLIDKFSITHWLFPPYTKKVKQLIGITVKYLS

SEQ ID NO: 1614 - protein, 495 aa, Staphylococcus aureus
  source 1..495: note = Staphylococcus aureus (strain bovine RF122 / ET3-1)_Putative aldehyde dehydrogenase AldA; sp|Q2YV11|ALDA_STAAB
MAVNVRDYIAENYGLFINGEFVKGSSDETIEVTNPATGETLSHITRAKDKDVDHAVEVAQEAFESWSLTSKSERAQMLRDIGDKLMAQKDKIAMIETLNNGKPIRETTAIDIPFAARHFHYFASVIETEEGTVNDIDKDTMSIVRHEPIGVVGAVVAWNFPMLLAAWKIAPAIAAGNTIVIQPSSSTPLSLLEVAKIFQEVLPKGVVNILTGKGSESGNAIFNHDGVDKLSFTGSTDVGYQVAEAAAKHLVPATLELGGKSANIILDDANLDLAVEGIQLGILFNQGEVCSAGSRLLVHEKIYDQLVPRLQEAFSNIKVGDPQDEATQMGSQTGKDQLDKIQSYIDVAKESDAQILAGGHRLTENGLDKGFFFEPTLIAVPDNHHKLAQEEIFGPVLTVIKVKDDQEAIDIANDSKYGLAGGVFSQNITRALNIAKAVRTGRIWINTYNQVPEGAPFGGYKKSGIGRETYKGALSNYQQVKNIYIDTSNALKGLY

SEQ ID NO: 1615 - protein, 507 aa, Streptomyces coelicolor
  source 1..507: note = Streptomyces coelicolor (strain ATCC BAA-471 / A3(2) / M145)_Probable aldehyde dehydrogenase; sp|Q9RJZ6|ALDH_STRCO
MTRYAAPGTEGAIVSYQSRYDHFIGGEYVPPARGQYFENPSPVNGLPFTEIARGTADDVERALDAAHEAAPGWGRTSVTERSDILLKIADRMEANLERLAVAESWENGKPVRETLAADIPLAIDHFRYFAGAVRAQEGSLGEIDDDTVAYHFHEPLGVVAQIIPWNFPILMATWKLAPALAAGNAVVLKPAEQTPASIHYWLSLVADLLPPGVLNVVNGFGVEAGKPLASSPRVAKVAFTGETTTGRLIMQYASENIKPVTLELGGKSPNIFFEDVWARDDDFRDKALEGFTMFALNQGEVCTCPSRALVQRGVYAEFMEAAVARTELIKPGHPLDTDTMIGAQASNDQLEKILSYLDIGRQEGAKVLTGGERIEHDGELKGGYYVQPTIFEGHNRMRIFQEEIFGPVVSVTSFDDFDDAVKTANDTLYGLGAGVWTRDMNTAYRAGRAIQAGRVWTNCYHAYPAHAAFGGYKQSGIGRENHKMMLEHYQQTKNILCSYSPKKLGFF

SEQ ID NO: 1616 - protein, 473 aa, Bacillus velezensis
  source 1..473: note = Bacillus velezensis SQR9_putative 3-polyprenyl-4-hydroxybenzoate decarboxylase; AHZ14366.1
MAYQDFREFLAALEKEGQLLTVDEEVKPEPDLGAAARAASNLGDKTPALLFNNIYGHHHAQVALNVIGSWPNHAMMLGMPKDTPVKEQFFEFAKRYDAFPVPVKREETAPFHENEITEDINLFDILPLFRINQGDGGYYLDKACVISRDLEDPDNFGKQNVGIYRMQVKGKDRLGIQPVPQHDIAIHLRQAEERGVNLPVTIALGCEPVITTAASTPLLYDQSEYEMAGAIQGEPYRIVKSKLSDLDIPWGAEVVLEGEILAGEREYEGPFGEFTGHYSGGRSMPVIKIKRVYHRNNPIFEHLYLGMPWTECDYMIGINTCVPLYQQLKEAYPNEIVAVNAMYTHGLIAIISTKTRYGGFAKAVGMRALTTPHGLGYCKMVIVVDEDVDPFNLPQVMWALSTKMHPKHDAVIIPDLSVLPLDPGSDPAGMTHKMILDATTPVAPETRGHYSQPLDSPLTTKEWEQKLMDLMNQ

SEQ ID NO: 1617 - protein, 187 aa, Lactiplantibacillus plantarum; identical to SEQ ID NO: 1033
  source 1..187: note = Lactiplantibacillus plantarum (strain ATCC BAA-793 / NCIMB 8826 / WCFS1)_Flavin prenyltransferase LpdB; sp|F9UT67|LPDB_LACPL

SEQ ID NO: 1618 - protein, 624 aa, Fusarium oxysporum
  source 1..624: note = Fusarium oxysporum f. sp. raphani_ Tryptophan 2-monooxygenase; KAG7435611.1
MRFFSFNNKRDSHNHSKKDRTIPPSKPVFNSHFAKRQSSKIGEQKVRPQAWVDTPQIVYSAWNQAAGDIDQPLGTLPSNFSIALVGGGITNVVLAFNLVKAGADVTLIEATDDVGGRLRTIQTPDGVNVAEMGAMRFPPSEDLLYYYANEFNYTFIQNFPDPGKVPTVVFYQETPTSWVSQNVTVKGFEKVSNGWGSLISKGLTGGSQSITAATQLTKWLSSSDVDTRNQVIPEWQKYLDEFGNDSFYTALQRIFGENHEWDVPGGQVWTEDDFERFGTLGVGSGGFGAVYSAGFNSIFRLIVNGLESDQAIFAKMTDDGLQATGIRELANAIWQKATDLGLKTKFDTVAKITTGGGGDVDYVVIQETPSSDDGNSTADQAQYDLAVVGTSSRAMNFALADVSDTTNEPIMSSAVNRGITDLHMTASSKLFIRTKKFWSDQPADFPRVILSDTDLPQAYTLDYGHPDYGMVLLTYAWEDLSQTILAIQDPHKLLSILKEQIARIMRDSSYPNYADFLDPVTDDDVYLVHWPLDQYSYGAFSLGLPGQDKLISSMFYDYQKLNDTSSSRVLINSDCTSFLGGWVDGGLQPAHNSMAAIFERFGSLNPVAADFAPSVLLGASPYQY

SEQ ID NO: 1619 - protein, 623 aa, Colletotrichum aenigma
  source 1..623: note = Colletotrichum aenigma_ Tryptophan 2-monooxygenase; KAF5524112.1
MIPSFNYKKNTAYAPLTVRDTPSTNKKTSLYQLAKRQSTTPTEQKARPQAWVDTPQLIYSAWPQAAGDINQPLGTLPSDFKIGLVGAGITNVVLAFNLAKAGADVTLIEATDSVGGRLRSLPTPDGVNVAEMGAMRFPPSEDLLYYYANAFNYTFIQNFPDPGKVPTIVFYENNATDWVDSNTPPSGFEKVNNGWIKLISGGLTKGGSSALTAASKMTEWLSSSDATTRAQAVPEWQKYLDTFGDDSFYSALQRIFGENHEWDVPGGEVWTEDDFTRFGTLGIGSGGFGAVYTSGFNSVFRLVVNGLESDQAVFAKNTTSGLQPAGIRDLATTIWDKATELGVKTKFSTVAEVTSGGGDPLGGLAVGVRETTSSGTTDTEYDLVIVGTSNRAMTYAFTPVSETTEDPILSNEVQRGINDLHMTASSKLFIRTKKFWENQPAGFPRVILSDTNLPQTYTLDYGHPDYGMVLVTYAWEDLSLQMMAILDPKELLADLKTQVARIMQETDYAQYADYLTPVTDDDLYLIHWPLDRYSYGAFSLGLPGQDDDISAMFYDYEKFSINNQSSRVLINSDCTSFLGGWVDGGLQPAHNTLSAVFEQFGSLNPLAASLAPSALLNSSSYQY

SEQ ID NO: 1620 - protein, 662 aa, Diplodia corticola
  source 1..662: note = Diplodia corticola_ Tryptophan 2-monooxygenase; XP_020130314.1
MPHIPNLRSYEKKTPHGIPKLIIGPPRTDSTDSTERGSVSVKPQGYLDNPSVIYSQWNQNAGGIEKRLGSFDSPPKVCLIGGGISNVVTAFELVKAGADVTLLEATGKVGGRLKSLAMPDSSDTNNVAEMGAMRFPPSEDLLYYYAEQNGFTFLPDFPDPGVKPTVISYQKSQYLWTNPKQPPPGFETVYGGWNEFISKGVTEHKGTEHVLMPSHQLQEMLKSPELSQRRAVIPHWQKYLEVFAHDSFYQGLQKIFGKKHQWDVPNGNVWTQDDFSRFAALGVGSGGFGPMFPISFNTIFRMIPNGLETEQQVFAKAQDSGPPSPAGIQDLAATILQKTIDLERKFTFKPNTTGDVVNLKGDPSSGVTHMTVDVSEAPTNGGSAATNTYNLVIVGTTTRAMDVNMSISNLDPEDQPYFSNSVCEAINDIHMASSSKLFIRTAKFWERDPPDPNFPRLILSDTKLPQLYTLDYGNRDYGMVLVTYAWEDLSTKISAQTDPMALLAVLKKQAASIMKHTHYPAWASNLVPVNSGDDGFLVHWQLDPQMEGAFALGYPGQDGLTHRMFFDFTKLVTGKEALAPVLLGGDSISFTGGWIEGGLQCAMNNVSAVLKAYGTLEPRAAKFAPVNLMRSEDYGYKEPRGGARGAVRDTKGGGGKVDEFVR

SEQ ID NO: 1621 - protein, 599 aa, Yarrowia lipolytica
  source 1..599: note = Yarrowia lipolytica_ Tryptophan 2-monooxygenase; ARQ31703.1
KPAFNSHFAKRQSSKIGEQKVRPQAWVDTPQIVYSAWNQAAGDIDQPLGTLPSNFSIALVGGGITNVVLAFNLVKAGADVTLIEATDDVGGRLRTLQTPDGVNVAEMGAMRFPPSEDLLYYYANEFNYTFIQNFPDPGRVPTVVFYQETPTSWISQNVTVKGFEKVSNGWGSLISKGLTGGSQSITAATQLTKWLSSSDVDTRNQVIPEWQKYLDEFGNDSFYTALQRIFGEKHEWDVPGGQVWTEDDFERFGTLGVGSGGFGAVYSAGFNSIFRLIVNGLESDQAIFAKMTDDGLQATGIRELANAIWQKATDLGLKTKFDTVAKITSGGGGDVDYVVIQETPSSDDGNSTADQAQYDFAVVGTSSRAMNFAFADVPDTTNEPIMSTAVNRGITDLHMTASSKLFIRTKKFWSDQPADFPRVILSDTDLPQAYTLDYGHPDYGMVLLTYAWEDLSQTILAIQDPHKLLSILKEQIARIMRDSSYPNYADFLDPVTDDDVYLVHWPLDQYSYGAFSLGLPGQDKLISSMFYDYQKLNDTSSSRVLINSDCTSFLGGWVDGGLQPAHNSMAAIFERFGSLNPAAADFAPSALLGASPYQY

SEQ ID NO: 1622 - protein, 623 aa, Colletotrichum aenigma; identical to SEQ ID NO: 1619
  source 1..623: note = Colletotrichum aenigma_ Tryptophan 2-monooxygenase; XP_037181751.1

SEQ ID NO: 1623 - protein, 649 aa, Fusarium proliferatum
  source 1..649: note = Fusarium proliferatum_indole-3-acetamide hydrolase; AEX60887.1
MNSKHALVMLWPTAIAALTVSNSSSSSILLDNQDQIFSADDSQYLAVTSDILSSVSYSSDTAQGPVTYISGLLSSTTADELEDVIKSSLEQDDVFTEAFLGTVLVSAGDEGDIDSSVVSYFSSLNATVIYGGKDGPSLCGNSTLTPCPMFGLADGDSLRLSKVFRLYVDTYRTFMVGIYEAEDGYRTLPYSNSEWGAPSIPVPSRLYSIEDDRPLAGKRIGVKDIYDLEDIQTTAGSLAYASLHSKADTTAPALQRIIDQGGVVVGKQKTAQFASPQSPWDWNNAFYPRNPRGDTFLTCSASSAGSACSIAAYDWLDFAVGTDTGKSIREPAAVAGIFGNRPSQGMISMDNIITNAFNTDTAGVFARDPVAWAKFAKAWYDPSLHQDTSINGLPALSVPDAQTFPKRLLYPVDHLPMQNPAAEAILQKFLDDVADAVGVTVDKINLTQTIEETLDRPLQGMLDDLTVLWTHDLITETAEPLISNYSPGFPPIDEPYRSFFRNAVSDDSSYKSAMANRTRDAALWHKQVLFSTNSSCSESILLYDIGTGGLPSFREKDLNDSPGAASPVDPRGPKAVSTISSYFGDVDITVPIGQVSYQSNVTFQEEVMPVTVNMVAKRGCDFVLFNLINKLVSKGVLSSVDTGKQAFQE

SEQ ID NO: 1624 - protein, 589 aa, Thelonectria olida
  source 1..589: note = Thelonectria olida_indole-3-acetamide hydrolase; KAH6898048.1
MQNLQACLSAVTRDKLENIVERYLAEDDVFAAGFLNKVIVTSQSPGFIDIASIDDLQQSDLDIIHLNTEGYYAQGSSSSSDSTLPPGPLYAIANGTSLQLSKVYRLYEDSYRTFVGGVYESNGRQKSLNYFEPHWGYPMIPVPSRLYSIGDQRPLAGKRIGVKDIYDIEGIKTTRGSRAYSQVYGPANATASSIRRIIDLGGAVVGKQKTAQFASAAHAWEWTDAYYPQNPRGDGFLSCSASSSGGGCSIAAYDWLDVAIGSDTGQSVRQPAAFSGTYDNRPSQGLMALDCVMPIAYGTDTAGFFSRHPEEWIAFAKAWYDPSFYQDQSLNRLPELSVPDERTFPKRILYPVDHLPLPNGAAEEILQQFLKDVANLLDATVENFNLTETVEKATERSLPDILRDLDVLWYHDLRKDVAMPLLEKYKPGFPPLDKPFRDSFRKFAFNDAQYEAALQNRSRDAELWHEKVLYQTDESCSESIFIYDIGTGGLPSFREKELNQSPGAALPAACRTAGAAPIISSYFGDVDITIPIDQVAYFSNVTYEEVLMPVTVNLVARRGCDFVLFNLVGELAKKGIVKPVLTGRQAYAS

SEQ ID NO: 1625 - protein, 644 aa, Tricholoma vaccinum
  source 1..644: note = Tricholoma vaccinum_indole-3-acetamide (IAM) hydrolase; AJP77092.1
MLFGFFAVLYTLVVNCIFAAAVLEVIEDNASGSILRIGGIVYLAPHFPYATYKPKRSGIPSSPGFTAVTSIRTNLSPITKTHLQQQLTLFSEFDDVYSDRFMDSLFISYDGTGSAVFEADVGSWLESLKIQHLLKPSMSLRSREDHHLALFSLPRPRKEIFSTCTVHIACIKTNTKPSYDSGQQYIPVPSRLSVWTQSLPLTGTRFALKDIYNAQGLVTGAGSLAYARVHGEANTTAPSIQRLLALGATMVGKVRTSQFAHGANPWDFLDIPYCWNPRADGYLTASASSSGSACAIAAYEWLDFTVGSDTRGSVRKPATLVGAYGIRPSHGSMDLTGVLPLSEEMDTAGYFARDPRFFSEIGRLWLVDPLNPLLSYEGSPVKAKGRLSQLPSKLLYPIDHFPVKNPAAQRLFDSFADILHEHLNISKVPINFTDALLPYLPNGNFHEFQLLCDRLGEYRTWKSVGEPLIAKHQELFGSTPSFDIRPRAMFAQGSKLSDEDFAEAVTFKRTFAKSVSEHLIRADDKSCSDSIFMYDAGTGGLPSYRVEDFNSLSGSTPFVLTTTVAGSKASEYFTYIGSMGGLPEITVPIGQVGYYSQVSRHWEVLPVAVQLVAHPGCDEMLFQLVEDLAAAGVLKSVKVGTEAF

SEQ ID NO: 1626 - protein, 548 aa, Emericella nidulans
  source 1..548: note = Emericella nidulans _Acetamidase; sp|P08158|AMDS_EMENI
MPQSWEELAADKRARLAKTIPDEWKVQTLPAEDSVIDFPKKSGILSEAELKITEASAADLVSKLAAGELTSVEVTLAFCKRAAIAQQLTNCAHEFFPDAALAQARELDEYYAKHKRPVGPLHGLPISLKDQLRVKGYETSMGYISWLNKYDEGDSVLTTMLRKAGAVFYVKTSVPQTLMVCETVNNIIGRTVNPRNKNWSCGGSSGGEGAIVGIRGGVIGVGTDIGGSIRVPAAFNFLYGLRPSHGRLPYAKMANSMEGQETVHSVVGPITHSVEDLRLFTKSVLGQEPWKYDSKVIPMPWRQSESDIIASKIKNGGLNIGYYNFDGNVLPHPPILRGVETTVAALAKAGHTVTPWTPYKHDFGHDLISHIYAADGSADVMRDISASGEPAIPNIKDLLNPNIKAVNMNELWDTHLQKWNYQMEYLEKWREAEEKAGKELDAIIAPITPTAAVRHDQFRYYGYASVINLLDFTSVVVPVTFADKNIDKKNESFKAVSELDALVQEEYDPEAYHGAPVAVQVIGRRLSEERTLAIAEEVGKLLGNVVTP

SEQ ID NO: 1627 - protein, 545 aa, Aspergillus oryzae
  source 1..545: note = Aspergillus oryzae_Acetamidase; sp|Q12559|AMDS_ASPOR
MPSASWEDLAADKRARLEKSIPDEWKFKSVPIEGSVIDLPEKSGILSPSEIKITNSSATELVAQLANGTLKSVDVTLAFCKRAALAHQLVNCAHDFFPELALAQARELDRYFETHKKPVGPLHGLPISLKDQLRVKGTETCMAYISWLGKRDTSDSILTALLRKAGAVFLVKTSVPQTLMVCETVNNIIGRTSNPRNLNLSCGGSSGGEGAMIAMRGGAIGIGTDIGGSIRVPAAFNSLYGIRPSHGRLPYGGMTNSMEGQETIHSVVGPIAHSAQDVRLFLQSVLKEEPWKYDSKVIPLPWREAEENAAQAKIAEKSLNFAFYDFDGVVRPHPPITRGVEIVRSTLEKDGHTVAPWTPYKHAFAVDLANKIYAADGSTDVYKHINASGEPAIPNIKDLMNPNLPKADLNEVWDAQLQKWRYQCEYLDKWREWEERTGKELDAIIAPVAATAAVRHNQFRYYGYATVFNVLDYTSVVVPVTYADKAVDHRLADYQPVSDMDKAVYAEYDPEVYHGAPVAVQIIGRRLSEERTLAIAEYVGKLLGH

SEQ ID NO: 1628 - protein, 530 aa, unidentified
  source 1..530: note = Gibberella moniliformis_Amidase; sp|W7MLD8|FDB95_GIBM7
MAEVNWQQLINQKRATREALIPEQWLLPATITSKVTPQSTASAFELLSEAGLLTEREIDITEKYTAVSLTAKIATGELSSYDVATAFCKRAAIVHQLTNSLTEIFFDKALERARWLDEYLSKEGKTVGPLHGLPITLKDMIHVKGQYSTMGFVGHLRHPPADENAVITDMLEAAGAVFYCKTNVPQTLFVCESFNNVFGRTLNPYKLCLSPGGSSSGEAAQLGLCGSIMGVGSDIAGSVRVPAIFTGVYGFRPTVNRLPWSKQAELALKGWQGVQPTLGPMARTAQDLTLFMKTIIQAEPWRYDSTALAIPWHDAPRKDKLTIGVWSQDPQFPVFPPIARTMASAVGRLRAAGHTIKIIEAPPTMKAMKIAMRWFALDQVNLPLKFVQDGAESPIADLDAMDPGKFLDPGYVADLSENISISADIHDYREEWAKIWREAGIDVLLCPASRGSAVPHGEFGPLMYTIPWNLLDFPSSVVPFGKADKTLDSKDGYDSTVVDGAPTGFQLVGWRFQDEQTLMATEVIADTLKA

SEQ ID NO: 1629 - protein, 549 aa, Saccharomyces cerevisiae
  source 1..549: note = Saccharomyces cerevisiae_Probable amidase; sp|P22580|AMDY_YEAST
MTVHSTWKEKVQLKKDQLNSKIKDEWKLNSTTITRLKNDKKNLIKNIDDLCSSSENQITHSTIMALRQALEAKELSCHEITAAFCHRAALIHQVVNCLSEIMFSEALRLADYYDSNRPAILPPLYGIPISLKDQCNVEGVDTSLGYLCRTFKPKTKNEESLIVSFLRDLGAIIFVKTTVPSSMMATDTQSNTFGYTYNSINLSFSSGGSSGGEGSLIGAHGSLLGLGTDIGGSIRIPSSYQGLFGLKPTFGRVPYLRVDNSFEGRETIPSVIGPLARDLSDLRYFMSCVINICQPWVQDVKCIPYHFDSSTSKLHDNYVVGIWYGDGVIDPPPSDIRALKTCEDLVNKTKGMKAVKWEPSSELSRELFDLANEADVADSGNEIKNEFEISGEPLLDILKPMVLENGRPPYTVNEWWDLTKRVYNAQQLMRDYYLSFPESERPDVIISPTTLMPFRPGDMLKTTLRYILLFNVLNFPSLSIPVGSVDCQIDGLMDTTSALNPEDKMIKTYWNDLIQSGEIDGFPIGLQVVSPTFNDNEVCKFASWLFSKI

SEQ ID NO: 1630 - protein, 497 aa, Ustilago maydis
  source 1..497: note = Ustilago maydis_indole-3-acetaldehyde dehydrogenase ; AAC49575.1
MPTLNLDLPNGIKSTIQADLFINNKFVPALDGKTFATINPSTGKEIGQVAEASAKDVDLAVKAAREAFETTWGENTPGDARGRLLIKLAELVEANIDELAAIESLDNGKAFSIAKSFDVAAVAANLRYYGGWADKNHGKVMEVDTKRLNYTRHEPIGVCGQIIPWNFPLLMFAWKLGPALATGNTIVLKTAEQTPLSAIKMCELIVEAGFPPGVVNVISGFGPVAGAAISQHMDIDKIAFTGSTLVGRNIMKAAASTNLKKVTLELGGKSPNIIFKDADLDQAVRWSAFGIMFNHGQCCCAGSRVYVEESIYDAFMEKMTAHCKALQVGDPFSANTFQGPQVSQLQYDRIMEYIESGKKDANLALGGVRKGNEGYFIEPTIFTDVPHDAKIAKEEIFGPVVVVSKFKDEKDLIRIANDSIYGLAAAVFSRDISRAIETAHKLKAGTVWVNCYNQLIPQVPFGGYKASGIGRELGEYALSNYTNIKAVHVNLSQPAPI

SEQ ID NO: 1631 - protein, 482 aa, Leucosporidium creatinivorum
  source 1..482: note = Leucosporidium creatinivorum_indole-3-acetaldehyde dehydrogenase ; ORY92703.1
MSLGLFINNKFVPGVEGRTIDVLNPSNDKKIAVVSEAGAQDIDIAVDAAEKAFNTVWGEKVPGFERGRMLIALAEAFEANAETLASIEALDNGKAYGFAKGFDVAEAAACLRYYGGWADKNHGKTIETHDKKLAFTRHEPVGVVGQIIPWNFPILMFAWKLGPALATGNTIVIKVAETTPLSAFYAARLIADIFPPGVVNIVTGYGAIAGAAISSHMKISKVAFTGSTLVGRQIMKAAAQSNLKSVTLELGGKSPNIIFDDADLEQAVSWSTFGLFFNHGQCCCAGSRIYVQESVYDKFLELLTAKVKSIKVGSPFAADTFQGPQTSQLQFDRISEHIKSGKDEGATVHIGGERHGTEGYFLQPTIFTDVKPHMRIVKEEIFGPVVVVAKFKDEADIIAQANDTMYGLAAAVFSRDVSRALNTAKQLKAGTVWVNCYNQLHSQTPFGGYKQSGIGRELGEYALANYTSVKAVHINLEQPHPL

SEQ ID NO: 1632 - protein, 482 aa, Ustilago maydis
  source 1..482: note = Ustilago maydis 521_indole-3-acetaldehyde dehydrogenase ; XP_011389876.1
MTVGVASKLLDAPFSHVINGKSVDTQGFKTLDVIDPATEKAIAQVPIATKETVDQAVDAAHAAFPSWSKTTWDERAKLLEQYGEEYKAMLPELVKLLTAEQGKSIQFAQHECETILPWFTELAKVRLDEKVVHENDTHKAIERYVPLGVCAGIVPWNFPVLLMLWKVTQAIVTGNCIIIKPSPFTPLCDIRIIEAAQKVFPPGVVQIVVGDDNLGPWITEHPRIQKISFTGSTATGKLVAKSCSATLKRFTLELGGNDPLVVLPQQKDLAATAQNVLLAAFFNSGQVCIAAKRIYIHEDIYDEFKATLAQVVQHFKVGPGNEEGVMFGPINNKMQYNKVGEFFEEAKKNNFNLVAGGQVEEKPGFFYPLTIVDNPPENSRLVQEEPFGPIVPLLKWKDEADLVKRINDSQWGLGASVWSSDIQAAERIGRQIESGTIWINCLVHHHPAVPFGGFKSSGIGAEHGKNGLGAYCQVQALWIPKA

SEQ ID NO: 1633 - protein, 300 aa, Rhodotorula toruloides
  source 1..300: note = Rhodotorula toruloides_indole-3-acetaldehyde reductase ; GEM09689.1
MSTFSVHTLNDGNKVPGVAFGIGTAHFGNDDDNLVETLKTAISAGFRHLDGAEAYRNEGSLGKAIAQSGVPREELFVTTKAGTGLADIPSSFDESLKKLGLSYVDLYLIHWPYDFCKASYPSIQEAWKQMEAIKDSGRAKSIGVSNFRVRDLEKIYSLPDLKHPPAVNQIEFHPFMYEAGEELYQYMKNKQIALEAYGPTSPLTKLLNPGFEEALNNVTKSVASRARKDKVEPGQVLLRLAAQRGAIVVTTSGKDWRMREQLAAGALPELTQDEVDSLVKAAKPAPQRVFMKHMDGDDEY

SEQ ID NO: 1634 - protein, 299 aa, Fusarium oxysporum
  source 1..299: note = Fusarium oxysporum_NAD/NADP-dependent indole-3-acetaldehyde reductase ; KAG7435006.1
MGSVATKDVPTYKLNDGNEIPVLAFGLGTAQYKKDPESGLDQHVVDITTKAIKTGYRHLDGAEVYGNEEELGQAIKAGGVPREQLYVTTKIPAEKKGSAIDSFNVSLQKLGLEYVDLYLIHGPWFAETDEDLQQRWAELEQIKESGKAKSIGVSNFLQSHLEAVLKTAKIKPAINQIEYHPYLQHGDLVDFHKKHNIAVSAYGPLTPIVTAKGGPVDPFYTKLAEKYKVTESEVGLRWVIDQDIIALTTSNKVERLEGYLAKLPKFKLTQDEIAEISRLGAKKHFRGFWRNKFDENDRS

SEQ ID NO: 1635 - protein, 788 aa, Scedosporium apiospermum
  source 1..788: note = Scedosporium apiospermum_Indole-3-acetaldehyde reductase (NADH); KEZ43807.1
MAPVIDIGLDGRSPRLYITDEEDVRTAEYVTLSYYWGKSNGPARTTKNNLEARRREINTAELPQTIRDALLITKHLGVRFLWVDAICIVQPTDQDRSDWLNEAPKMGQYYSNAACTIAACVASDSAEGFLHERPLEKLQPERECPLEPWTPSPKLFPEPPAHVTVLKPSPSRLGFRVASSPLYKRGWTLQEQILSTRTMYWTKHALFWGCAEERAAEFRPDGLSASSFPGHITLSQFLSSNADKALGNMWLSVVAHYSSASLSHESDRLAALMGLASRLQDHFGDEYLFGIWKSQLLAGIAWQSVVRSHHRIREGMACTLPSWSWVSLRAPVIFPLDCPLEIEWLAEVVAVEGETNVLNPVGEKVFECRVRIKGKVILIDQVPPDTVQFGKEDQEWDLGGQRRTVEILMAEMDCSPKPHPNNDLGCLVLASWGMDQTATARIELSCLFLAGFSFFLGSLLPLSSLPRYSNNHPTNIVSRYPKVKSNMSAPKIPTIKLNDGHEIPVLAYGLGTARATRGGPLDTSLVELTKKAIATGFLHLDGAQMYGNEAELGEAIRTSPTPRSSLFITTKYSYYTAPTPATFSASLSKLGLDYVDLYLIHHPFCGGSSGTSLAPYDPAKLQQTWADLEQLQREGKIRSIGVSNFLREHLEVVLETAKVVPAVNQIEFHPYLQHRGLLDFHREKGIVTEAYGPLTPIVRAVEGPVAAIYNRLAEKYGVSESVVGLRWVIDRGVVAITTSSKEERLRSYIEKVPSFKLTEEEVKEISEAGLQKHYRAFFTNRYPEDDRS

SEQ ID NO: 1636 - protein, 575 aa, Saccharomyces cerevisiae
  source 1..575: note = Saccharomyces cerevisiae_Transaminated amino acid decarboxylase; sp|Q06408|ARO10_YEAST
MAPVTIEKFVNQEERHLVSNRSATIPFGEYIFKRLLSIDTKSVFGVPGDFNLSLLEYLYSPSVESAGLRWVGTCNELNAAYAADGYSRYSNKIGCLITTYGVGELSALNGIAGSFAENVKVLHIVGVAKSIDSRSSNFSDRNLHHLVPQLHDSNFKGPNHKVYHDMVKDRVACSVAYLEDIETACDQVDNVIRDIYKYSKPGYIFVPADFADMSVTCDNLVNVPRISQQDCIVYPSENQLSDIINKITSWIYSSKTPAILGDVLTDRYGVSNFLNKLICKTGIWNFSTVMGKSVIDESNPTYMGQYNGKEGLKQVYEHFELCDLVLHFGVDINEINNGHYTFTYKPNAKIIQFHPNYIRLVDTRQGNEQMFKGINFAPILKELYKRIDVSKLSLQYDSNVTQYTNETMRLEDPTNGQSSIITQVHLQKTMPKFLNPGDVVVCETGSFQFSVRDFAFPSQLKYISQGFFLSIGMALPAALGVGIAMQDHSNAHINGGNVKEDYKPRLILFEGDGAAQMTIQELSTILKCNIPLEVIIWNNNGYTIERAIMGPTRSYNDVMSWKWTKLFEAFGDFDG

SEQ ID NO: 1637 - protein, 497 aa, Emericella nidulans
  source 1..497: note = Emericella nidulans_Aldehyde dehydrogenase; sp|P08157|ALDH_EMENI
MSDLFTTIETPVIKYEQPLGLFINNEFVKGVEGKTFQVINPSNEKVITSVHEATEKDVDVAVAAARAAFEGPWRQVTPSERGILINKLADLMERDIDTLAAIESLDNGKAFTMAKVDLANSIGCLRYYAGWADKIHGQTIDTNPETLTYTRHEPVGVCGQIIPWNFPLLMWSWKIGPAVAAGNTVVLKTAEQTPLSALYAAKLIKEAGFPAGVINVISGFGRTAGAAISSHMDIDKVAFTGSTLVGRTILQAAAKSNLKKVTLELGGKSPNIVFDDADIDNAISWANFGIFFNHGQCCCAGSRILVQEGIYDKFVARFKERAQKNKVGNPFEQDTFQGPQVSQLQFDRIMEYINHGKKAGATVATGGDRHGNEGYFIQPTVFTDVTSDMKIAQEEIFGPVVTIQKFKDEAEAIKIGNSTDYGLAAAVHTKNVNTAIRVSNALKAGTVWINNYNMISYQAPFGGFKQSGLGRELGSYALENYTQIKTVHYRLGDALFA

SEQ ID NO: 1638 - protein, 532 aa, Saccharomyces cerevisiae; identical to SEQ ID NO: 1096
  source 1..532: note = Saccharomyces cerevisiae_Fatty aldehyde dehydrogenase HFD1 ; sp|Q04458|HFD1_YEAST

SEQ ID NO: 1639 - protein, 506 aa, Saccharomyces cerevisiae
  source 1..506: note = Saccharomyces cerevisiae_Aldehyde dehydrogenase [NAD(P)+; sp|P47771|ALDH2_YEAST
MPTLYTDIEIPQLKISLKQPLGLFINNEFCPSSDGKTIETVNPATGEPITSFQAANEKDVDKAVKAARAAFDNVWSKTSSEQRGIYLSNLLKLIEEEQDTLAALETLDAGKPYHSNAKGDLAQILQLTRYFAGSADKFDKGATIPLTFNKFAYTLKVPFGVVAQIVPWNYPLAMACWKLQGALAAGNTVIIKPAENTSLSLLYFATLIKKAGFPPGVVNIVPGYGSLVGQALASHMDIDKISFTGSTKVGGFVLEASGQSNLKDVTLECGGKSPALVFEDADLDKAIDWIAAGIFYNSGQNCTANSRVYVQSSIYDKFVEKFKETAKKEWDVAGKFDPFDEKCIVGPVISSTQYDRIKSYIERGKREEKLDMFQTSEFPIGGAKGYFIPPTIFTDVPQTSKLLQDEIFGPVVVVSKFTNYDDALKLANDTCYGLASAVFTKDVKKAHMFARDIKAGTVWINSSNDEDVTVPFGGFKMSGIGRELGQSGVDTYLQTKAVHINLSLDN

SEQ ID NO: 1640 - protein, 515 aa, Talaromyces stipitatus
  source 1..515: note = Talaromyces stipitatus_Aldehyde dehydrogenase ; sp|B8M9K4|TROPH_TALSN
MAPNFPPIEEALPLHHDLFYDGKWQTPITDSRRETLNPSTGQVIGKIADASTTDVDKAVEAAHKAFLSWKKTTMAERQGYMRRAAAILREHAAELALVESYNTGNPVAAMVIDAERAANALDYFAGLIPMLRGEVLPGPFPTEDYLHYTVREPMGVVARFVASNHPFMFAGARMASVIAGGNTVIIKPPEQAPLSCLRLAELLENVFPPGVVNILPGGAECGQALTCHPLVRKVSLIGSVATGKIIMRNAGSLMKQTSMELGGKNALIAFPDADIDHLVRSVAAGMNFTWAGQSCGSTSRVFLHDSIHDEVLARVVEVVRKGFRPGLATDPTTTMGSLISKAAQDRVLNYIASAREEGARLVTGGGMFDDLAGTPVEGGFFVQPTIFADVTPDMKIAREEIFGPVMSVLRWSDESELIRIVNSTNYGLTGSIFTKDLATAQRMIRQVEAGFVWVNDVCKHFLNVPYGGIKDSGIGRDECIDELFAYTNIKSVNINLGGATHLGSRLSQAGQISNT

SEQ ID NO: 1641 - protein, 496 aa, Davidiella tassiana
  source 1..496: note = Davidiella tassiana _Aldehyde dehydrogenase ; sp|P40108|ALDH_DAVTA
MTSVQLETPHSGKYEQPTGLFINNEFVKGQEGKTFDVINPSDESVITQVHEATEKDVDIAVAAARKAFEGSWRQETPENRGKLLNNLANLFEKNIDLLAAVESLDNGKAISMAKGDISMCVGCLRYYGGWADKITGKVIDTTPDTFNYVKKEPIGVCGQIIPWNFPLLMWAWKIGPAIACGNTVVLKTAEQTPLGGLVAASLVKEAGFPPGVINVISGFGKVAGAALSSHMDVDKVAFTGSTVVGRTILKAAASSNLKKVTLELGGKSPNIVFEDADIDNAISWVNFGIFFNHGQCCCAGSRVYVQESIYDKFVQKFKERAQKNVVGDPFAADTFQGPQVSKVQFDRIMEYIQAGKDAGATVETGGKRKGDKGYFIEPTIFSNVTEDMKIVKEEIFGPVCSIAKFKTKEDAIKLGNASTYGLAAAVHTKNLNTAIEVSNALKAGTVWVNTYNTLHHQMPFGGYKESGIGRELGEDALANYTQTKTVSIRLGDALFG

SEQ ID NO: 1642 - protein, 497 aa, Aspergillus niger
  source 1..497: note = Aspergillus niger_Aldehyde dehydrogenase ; sp|P41751|ALDH_ASPNG
MSDLFATITTPNGVKYEQPLGLFIDGEFVKGAEGKTFETINPSNEKPIVAVHEATEKDVDTAVAAARKAFEGSWRQVTPSTRGRMLTKLADLFERDAEILASIEALDNGKSITMAHGDIAGAAGCLRYYGGWADKIHGQTIDTNSETLNYTRHEPIGVCGQIIPWNFPLLMWAWKIGPAIATGNTVVIKTAEQTPLSGLYAANVIKEAGIPAGVVNVISGFGRVAGSAISHHMDIDKVAFTGSTLVGRTILQAAAKSNLKKVTLELGGKSPNIVFNDADIDNAISWANFGIFYNHGQCCCAGSRILVQEGIYDKFIARLKERALQNKVGDPFAKDTFQGPQVSQLQFDRIMEYIQHGKDAGATVAVGGERHGTEGYFIQPTVFTDVTSDMKINQEEIFGPVVTVQKFKDVEDAIKIGNSTSYGLAAGIHTKDVTTAIRVSNALRAGTVWVNSYNLIQYQVPFGGFKESGIGRELGSYALENYTQIKAVHYRLGDALF

SEQ ID NO: 1643 - protein, 458 aa, Cryptococcus gattii
  source 1..458: note = Cryptococcus gattii_tryptophan aminotransferase ; KJE04180.1
MTATTISTETVPQAPAPGTKTNGTLGKYNPRNYLSDRAKVTEIDGIRGLMACEGPGVVSFLAGRPNPDTFPFNSITLNLKPPLGLPESSNNMPVSITIEDPDLAIALQYAPSAGIPKLREWLADLQAHVHERPRGDYAISVGSGSQDLMFKGFQAVLNPGDPVLLETPMYAGVLPALRILKADYAEVDVDDQGLSAKNLEKVLSEWPADKKRPRVLYTSPIGSNPSGCSASKERKLEVLKVCKKYDVLIFEDDPYYYLAQELIPSYFALEKQVYPEGGHVVRFDSFSKLLSAGMRLGFATGPKEILHAIDVSTAGANLHTSAVSQGVALRLMQYWGIEGFLAHGRAVAKLYTDRRAQFEATAHKYLDGLASWVSPVAGMFLWIDLRPAGIEDSYELIRHEALAKGVLGVPGMAFYPTGRKSSHVRVSFSIVDLGDESDLGFQRLAEAIKDKRKALGLA

SEQ ID NO: 1644 - protein, 470 aa, Tricholoma vaccinum
  source 1..470: note = Tricholoma vaccinum_tryptophan aminotransferase ; AJP77090.1
MLVTVSSRRPSPPVQNLLLHPLSKSSLQTFTPPFSLMLRIIVCPASVVRGLLPLEDTPGIISLLSGKPNPDTFPFTSFTFTARSPINSKEDTILTIEGKELAQGLQYGPTAGEKQLISWIEGLQEFSHGRKKNEGWRVSIGTGSQDLIFKAVTALVNPGDSVLLETPTYAPAFPVVPHLPLLNMGCKVVMGLIYLRAAIYRKLASRQAKAQGFVYSPCKDVDIRQKYGCNPTGMTATLERRKEVLLLAREHNFIILEGMYDPYYYLYYGTAPRYPSYFALELEEPEVGRVLRFDSLSKILSAGIRLGFVSGPAPLVQAIDQCTSTSNLQTPSLTQIIIYKLLNSWGYDGFKIHTENVSVFYREKRDIFERAMRTHLSGLVEWSPPVAGMFIWFKLLLNGEPGEEEDSYDVILSKGLERGVLALPGAGFFPNSRKTAYVRVSFSAAPEPEVDEALKRLREAIIAARATNKK

SEQ ID NO: 1645 - protein, 381 aa, Tremella mesenterica
  source 1..381: note = Tremella mesenterica_tryptophan aminotransferase ; RXK35822.1
MTLNLKPSLDSTAPKGPTSITIQGTDLEDALQYGPSPGLVGLRGWLSGLQETVHKRPIGDSWGITMGTGSQDLMVKAFGAVLNRGDPILLEAPLYAGVLPSLKNLEAELIEVDVDDQGLSAKNLERVLASWPTDKRRPKAVYSNPTGCNPSGCSASRERKLEVLEVCRKYNLLMIEETDYLSSPLQPSYFELETEVFPHGGHVIRFDSVSKLFSAGMRLGFATGPKALINAIDVAHAANNLHTSSISQAVALALMQHWGIKGFLAHSTAVAHFYAERREKFEALAHKHLDGLATWVSPKAGMFLWIDMSPSGIDDSMELISKEALAKGVLAVPGFVFYPLKRKSAHVRVSFSLVDLDSEAELGFQRLAEAIRDKRRQMGFE

SEQ ID NO: 1646 - protein, 479 aa, Ustilago maydis
  source 1..479: note = Ustilago maydis _tryptophan amino transferase (transaminase) ; XP_011389975.1
MSSATSPALDYALLLSSSARNRMPSAIRSLFPAELIPGMVSLLSGKPNSETFPFQRISLELKPSIHLEGQTETVSIEGSDLDIALQYSATSGLPKLVDWIIKFQSRVHARKQVDEGNKPGEVWRCSFGNGSQDLLTKTFEALVDAGDSVVLESPAYSGILPSLVAHKANLFEAETDAEGVEPTALDTLLTNWKTDSATRDSRFPKFLYTTPTGANPSGTSASDNRKRAILDIIRKHNLLLLEDDPYYFLSFQGLEPGADAVKRTRGKSYFQLEAQDDYGVGRVVRFDSFSKILSAGLRLGFVTGPKEILDAIDLDTSSRNLQTSGTSQAIAYALLSKWGIDGFLHHADNVARFYQNRLERFEASAQAILTGSPSIASWVRPSAGMFLWIKLKLPPSPDSAEGDSFDLISNKAKAAGVLALPGVAFKPPSSSSTGGKRKTSAYVRTSFSQVPLDQVDTAFTRLRQVVEEAWREAGLQIPA

SEQ ID NO: 1647 - protein, 513 aa, Saccharomyces cerevisiae
  source 1..513: note = Saccharomyces cerevisiae_ aromatic amino acid aminotransferase Il; EDN62376.1
MTAGSAPPVDYASLKKNFQPFLSRRVENRSLKSFWDASDISDDVIELAGGMPNERFFPIESMDLKISKVPFNDNPKWHDSFTTAHLDLGSPSELPIARSFQYAETKGLPPLLHFVKDFVSRINRPAFSDETESNWDVILSGGSNDSMFKVFETICDESTTVMIEEFTFTPAMSNVEATGAKVIPIKMNLTFDRESQGIDVEYLTQLLDNWSTGPYKDLNKPRVLYTIATGQNPTGMSVPQWKREKIYQLAQRHDFLIVEDDPYGYLYFPSYNPQEPLENPYHSSDLTTERYLNDFLMKSFLTLDTDARVIRLETFSKIFAPGLRLSFIVANKFLLQKILDLADITTRAPSGTSQAIVYSTIKAMAESNLSSSLSMKEAMFEGWIRWIMQIASKYNHRKNLTLKALYETESYQAGQFTVMEPSAGMFIIIKINWGNFDRPDDLPQQMDILDKFLVKNGVKLVLGYKMAVCPNYSKQNSDFLRLTIAYARDDDQLIEASKRIGSGIKEFFDNYKS

SEQ ID NO: 1648 - protein, 458 aa, Cryptococcus gattii; identical to SEQ ID NO: 1643
  source 1..458: note = Cryptococcus gattii _tryptophan aminotransferase; KJE04180.1

SEQ ID NO: 1649 - protein, 605 aa, Tricholoma vaccinum
  source 1..605: note = Tricholoma vaccinum_indole-3-pyruvic acid (IPA) decarboxylase; AJP77091.1
MSSSEATLQAEVDRLRNEVQVLKEEQLGKSTKISIGNYILARLEQLGITVRQSMFGVPGDFNLGFLVRVFFVYQDLVEEHPTIDWVGNWYCLGLSLYLLYAADRTDRSNELNAAYAADGYARVKESIGVVLTTFGVGELSAINGIAGAFSEMVPVLHLVGVPSTAQQKDKPMLHHTLGDGRYVEIRHVTFFHRDSLLDTTHMTRLQNNSRIRGQARPVYLSVPTNLVLAKISSAPLRLPLNRNPPRNSRDEEAYVLDIISKQVEAAGGDVVVLVDACTIRHGVREEVNDFLRKTGFPVYAAPMGRTAIDEDYERFGGVYMGSITKRDVKRKVEFAKLILSIGSLKSDYNTGNFSYNIPTQRTIEYAMVAGVGMKELLPKLTEKLVSYRDRASHIEVPRFFNTVPNEGDDKITHSWFWPRVGDFLKPKDVIITETGTSNFGLLEVPLPPKSTLVNQVLWGSIGWATGDTLGASLAAREKGFERTILFTGDGSLQLTVQELSVMIRKGVKPIIFVLNNSGYTIERCIHGKTRKYNDISNWNWTALFSVFGDPDERLSSAFTVNTKGALSKLLDDATFAKAGKIQLVEVMMDKFDAPRALQEQAALSA

SEQ ID NO: 1650 - protein, 571 aa, Schizosaccharomyces pombe
  source 1..571: note = Schizosaccharomyces pombe _ Putative pyruvate decarboxylase C13A11.06 ; sp|Q09737|PDC1_SCHPO
MSGDILVGEYLFKRLEQLGVKSILGVPGDFNLALLDLIEKVGDEKFRWVGNTNELNGAYAADGYARVNGLSAIVTTFGVGELSAINGVAGSYAEHVPVVHIVGMPSTKVQDTGALLHHTLGDGDFRTFMDMFKKVSAYSIMIDNGNDAAEKIDEALSICYKKARPVYIGIPSDAGYFKASSSNLGKRLKLEEDTNDPAVEQEVINHISEMVVNAKKPVILIDACAVRHRVVPEVHELIKLTHFPTYVTPMGKSAIDETSQFFDGVYVGSISDPEVKDRIESTDLLLSIGALKSDFNTGSFSYHLSQKNAVEFHSDHMRIRYALYPNVAMKYILRKLLKVLDASMCHSKAAPTIGYNIKPKHAEGYSSNEITHCWFWPKFSEFLKPRDVLITETGTANFGVLDCRFPKDVTAISQVLWGSIGYSVGAMFGAVLAVHDSKEPDRRTILVVGDGSLQLTITEISTCIRHNLKPIIFIINNDGYTIERLIHGLHASYNEINTKWGYQQIPKFFGAAENHFRTYCVKTPTDVEKLFSDKEFANADVIQVVELVMPMLDAPRVLVEQAKLTSKINKQ

SEQ ID NO: 1651 - protein, 570 aa, Neurospora crassa
  source 1..570: note = Neurospora crassa_Pyruvate decarboxylase; sp|P33287|PDC_NEUCR
MVAQQQGKFTVGDYLAERLAQVGVRHHFVVPGDYNLILLDKLQAHPDLKEVGCANELNCSLAAEGYARANGISACVVTYSVGALSAFNGTGSAYAENLPLVLISGSPNTNDPSQYHILHHTLGHPDYTYQYEMAKKITCCAVAIPRAIDAPRLIDRALRAAILARKPCYIEIPTNLAGATCVRPGPISAITDPITSDKSALEAAAKCAAEYLDGKLKPVILVGPKAGRAGSEKELIEFAEAMGCAVALQPAAKGMFPEDHKQFVGIFWGQVSSDAADAMVHWADAMICVGAVFNDYSTVGWTAVPNIPLMTVDMDHVTFPGAHFSRVRMCEFLSHLATQVTFNDSTMIEYKRLKPDPPHVHTAEREEPLSRKEISRQVQEMLTDKTSLFVDTGDSWFNGIQLKLPPGAKFEIEMQWGHIGWSIPAAFGYALRHPDRHTIVLVGDGSFQVTAQEVSQMVRFKVPITIMLINNRGYTIEVEIHDGSYNKIKNWDYAMLVEAFNSTDGHAKGLLANTAGELADAIKVAESHKEGPTLIECTIDQDDCSKELITWGHYVAAANARPPRNMSVQE

SEQ ID NO: 1652 - protein, 337 aa, Aspergillus niger
  source 1..337: note = Aspergillus niger_ Arylacetonitrilase; sp|A2R6M7|NIT1_ASPNC
MTASTKVRVAVTQHEPVWLDLHATVDKTCRLIAEAAGNGAQLITFPECWLPGYPAWIWCRPVDMGLFTTYLKNSLSYDSEHMRRICNAAAQHKITVVLGLSERDGNSLYIGQCTIDSTGKIVMRRRKMKPTHMERTVFGESSGRSLLNVVDLPIGKVGALACWEHIQPLLKYHTMIQGEEIHVSAWPVLHPHMGGESLWGMSQEGGTGASQVYALESASFVLLTTAVLGPTCVKKMNLSPPWDTLGGGASAVIAPDGRRLTEPLPANEEGFVYADLDLDMILTCRHFVDACGHYSRPDLLWLGVDTREKTQHRPEGQADNAAYGLDVPSGLVEEEGA

SEQ ID NO: 1653 - protein, 322 aa, Talaromyces marneffei
  source 1..322: note = Talaromyces marneffei_Nitrilase; sp|B6Q5I3|NIT_TALMQ
MSKIVRVGAVQSEPVWLDLEGSVDKTISLIEKAAADGVNVLGFPEVWIPGYPWSMWTSAVINNSHIIHDYMNNSMRKDSPQMKRIQAAVKEAGMVVVLGYSERDGASLYMAQSFIDPSGEIVHHRRKIKPTHIERTIWGEGQAESLTCVIDSPFGKVGGLNCWEHLQPLLRYYEYSQGVQIHIASWPAEFEMPDPKKIAWLYHETGEASYRASQFFAIEGQAFVLVASQILTEANVERNNLTGNPVTKTPGGGFSMIFGPDGKPLCEPVDAGAEAILTADIDLRDIDKPKAFIDVVGHYARPDLLSLLVNPTVDKHVTTMKK

SEQ ID NO: 1654 - protein, 327 aa, Neurospora crassa
  source 1..327: note = Neurospora crassa_Arylacetonitrilase; sp|V5IPE4|NIT_NEUCR
MATTIKVAVTQAEPIWLDLQASIQKAVSLVHEAASNGAKIVAFSETWAPGYPGWCWARPVDPALNTKYAYNSLTANSPEMEQLQQAAKEDSIAVVIGFSERSSSGSLYIGQAIISPQGEVALQRRKLKPTHMERTIFGDGSGPDLNCVAELDFGSELGSIKVGTLNCWEHAQPLLKFHEIQQGVVIHIAMWPPIDPYPGVEFPGLWSMTADGCQNLSQTFAVESGAFVLHCTAVCNESGIEAMDTRNGMVFREPGGGHSCVIGPDGRRLTQPLADKPSAEGIVYADLDLTRVVTNKSFQDIVGHYSRPDLLWLSYDKEKKDAAVHRN

SEQ ID NO: 1655 - protein, 328 aa, Aspergillus niger
  source 1..328: note = Aspergillus niger_ Arylacetonitrilase ; sp|A2RA31|NIT2_ASPNC A11
MLSQVRVAVTQAEPVWLDLEATVKKTCDLIAEAAANGAQLVTFPECWIPGYPAWIWARPVDMRLSSIYIQNSLKIDSPQMASIQQCAAENKIVVVLGFSENLHNSLYISQAIIASDGKILTTRKKIKPTHMERTIFGDSFGDCLQSVVDTSAGRVGALSCWEHIQPLLKYHTYAQREQIHVAAWPPLFPHSEDGSLFSMSTEGTSSIARTYAIESQSFVLHTTTVIGQSGIDRMATSTGALMSTPGGGCSAIFGPDGRQLSQPIPSAEEGIIYADLDFEHIYHSKAFVDVCGHYSRPDLLWLGVEGGVKRHVRDNATTATPQVEQQEE

SEQ ID NO: 1656 - protein, 339 aa, Fusarium vanettenii
  source 1..339: note = Fusarium vanettenii _Arylacetonitrilase; sp|C7YS90|NIT_FUSV7
MACPIRVAVTQAEPVYLDLAASVKKACGLIAEAAQNGAKLVAFSECWLPGYPAWIWARPVDFELQTRYIYNSLPIESEAMELVKATAKEHSIAVALGFSEQSPSHSIYISQAIISPQGEVVMHRRKIKPTHMERTLFGDGSGADLNNVVEVDFGAEHGKIKVGCFACWEHTQPLLKYHSISQGEAIHISMWPPIDPSAGVDHPGLWSMTADGCQNLSQTYAIESTAYVLHSTSVCTQKGIETLKTQDGLSCRQPGGGHSCVIGPDGRRLTAPLGDGSPDAEGIVYADLDLTKVVATRGFLDIVGHYSRPDLLWLGVDREQKENIIAKQHKAAEQEAVQG

SEQ ID NO: 1657 - protein, 333 aa, Aspergillus oryzae
  source 1..333: note = Aspergillus oryzae_Arylacetonitrilase; sp|Q2U4D6|NIT_ASPOR
MTTPQPSQVRVAVTQAEPVWLDLKATVDKTCSLIAEAASKGAQLVSFPECWIPGYPAWIWTRPVDQELHSRYIQNSLTVSSPEMTQICKSANENNVIVVLGFSENIHNSLYISQAIISNTGSILTTRKKIKATHMERTIFGDAFADCLDSVVETAVGRVGALSCWEHIQPLLKYHTCAQREAIHVAAWPPLFEWGGPEDESLFSMSRDGTIALARTYAIESSSFVLHTTAVISQEGVEKMRTATGAIMNMPGGGSSAIFGPDGRLLSKPLLPTEEGIIYADLEMHDIYKTKAFVDVLGHYSRPDLLWLGVGSCDRRHVKEDAEERREDRVEVL

SEQ ID NO: 1658 - protein, 317 aa, Meyerozyma guilliermondii
  source 1..317: note = Meyerozyma guilliermondii_Nitrilase; sp|A5DNJ4|NIT_PICGU
MGAKVKVAVVQAEPVWFNLQETVKRVNELIESAYNKGAELIAFPEVFVPGYPTWIWTNAADLDRNLMYTKNSLTYDSPEFISIIETVKKYPIHVVLGFSEKDQGSLYISQCIIDNTGEIVLKRRKFKPTHVERVIWGDTADSNMKSVVTLNFKEAGPVEVGCLSCWEHMQPLLYYNSAAQHEKIHIGSWPALNDKDLGVYCFTKAGFHGLARAYANQVQSFYLFTSILGQRIQEALPDVKLSPYFEKGAGCGAVFAPDGSQITEDHPDDFDGVIISELDMDKILLQKNLVDIVGHYARPDMVSLSHNRPNTEFVNRK

SEQ ID NO: 1659 - protein, 320 aa, Aspergillus kawachii
  source 1..320: note = Aspergillus kawachii_Aromatic nitrilase; sp|G7XTA8|NIT1_ASPKW
MSHDGPKTIRVAAVQAEPEWNNLQKGVEKTIRLIIEAGKNGANVMGFPEVWIPGYPWSIWNQSVVDNVEFMDEYFRNSLERDSEEMNRIRCAVKEAGIFCVLGYSERYQGSLYISQSFIDENGDIVHHRRKIKPTHVERGFWGEGQADSLKSVVKSSFGNIGGLNCWEHTQTLLRYYEYAQNVDIHIASWPLIFGACAEMQYHISSEMCGKLTQVMSMEGACFTLICSQVMSAENCERNKVDKWSFVKAPGGGFSMIYGPAGEPLVEAPDAGEEVILYADVKLAEKWRAKQNLDVVGHYSRPDLLSLKVTNNAASQVHFA

SEQ ID NO: 1660 - protein, 316 aa, Fusarium oxysporum
  source 1..316: note = Fusarium oxysporum_Nitrilase ; KAG7427739.1
MSQLKIASVQFENWSGSKDKNLAIIHRMASDAANRGCNVVAFHECSVTGYTFASRLSKEELLDLAEEVPTGPSTRSLVKIARELAITILAGLFEKDENGHIYNTYICVDSNRGFVATFRKLHPFISPHLSPGNEYVVFDLLGWKCGILICYDNNVVENVRATALLGAEIIFMPHVTMCTPSTRPGAGFVDPSLWTNRDQDPTSLRAEFSGLKGRQWLMKWLPARAYDNAVYVVFSNPIGMDDDQLKNGCSMILDPFGDILSECSLLGEDMAVATCSKDKLQLAGGFRYRQARRPELYRDILGSDHNSSLNVSWLGK

SEQ ID NO: 1661 - protein, 241 aa, Aspergillus luchuensis
  source 1..241: note = Aspergillus luchuensis_Nitrilase ; GAT27082.1
MVLAAVGQLCSTGSLAANLTQCKTLVRKAAAAGAKALFLPEAADYIASSPAETISLARSVQDSEFVLGLQKEAQLANLHINVGIHEPASNGRIKNTLVWINEKGDITQRYQKVHLFDVDIKGGPVLKESALALKRQNAQIITYPSAFTVPTGTAHWETLLRARAIETQSYVIAAAQAGPHNEKRRSYGHSMIVNPWGEVVAKLDDEYQEPQIAVADIDLDLLAKVRREMPLLRRTDIYPEV

SEQ ID NO: 1662 - protein, 199 aa, Saccharomyces cerevisiae
  source 1..199: note = Saccharomyces cerevisiae_Nitrilase ; GHM90639.1
MAKHIVAALQIGSCPGSTKDTLKKILSYEKEIKESGAKLVVIPEATLGGYPKGSNFGVYLGYRLQEGREEYAKYLAEAIEIGNGEKYPEISQLCALSKATDASLCVGCIERDGTTLYCTMVYIDPKDGYVGKHRKLMPTAGERLIWGQGDGSTLPVVDTAAGKIGGAICWENMMPLLRYAMYKKGVEIWCAPTVDARPI

SEQ ID NO: 1663 - protein, 304 aa, Trichoderma lentiforme
  source 1..304: note = Trichoderma lentiforme_Nitrilase ; KAF3072241.1
MASNLKIALVQLYSKPLDVAGNFARAESYIRKAASQGANLVVLPEYHLGSWKPDSKILLATAKEQTPYLAKYQAIAKELGIAIAPGTILEPIPAEEGNASMTEGIANAAYFIGPDGAVLGRYQKKNLWHPERDHLTADGLTPHRAFDTPWGRVGLIICWDLAFPEACRALVADGAKFVVCPTFWLNSDGGDIGAEVNPECERLFLENVAVARAFENTCGFVFCNTGAPLGSGTSGKDEEGTEFIGLTQVAMPLQGALGKLGVEEAMTVVDVDLKVLDIAEEVYKVRADIAMEGWHYGHTLQPRE

SEQ ID NO: 1664 - protein, 454 aa, Penicillium expansum
  source 1..454: note = Penicillium expansum _L-tryptophan decarboxylase cnsB; sp|A0A0A2IDH4|CNSB_PENEN
MNSPTASDPIVRTLDAPETKDMQEAFLPGESPQDVASVIQETMDIFDKRMRLTHPHCFCYVPSCPSPLAWVGDLFTSLYNVNAVSWDVSSGPSAMEQGMIRWLAQQVGLPPSAGGCFVSGGSMANLSAVVAARDKLLPPMRRAEGTIYTSDQTHISIKKCLHIIGFDEHQIRVIPTDHLFRMDTDILRRTIAADRQCGRLPFLVVASCGTTNTGSIDPLHALADVAEEEGLWLHVDGAYGASIALSDKYRHLVDGIGRADSISWDGHKWLFQTYGCGIVLTRDSASLAHSFAVDAEYINSTTPHGAVNFYNLSPELSRPARAMPLWFTLRVLGRRQMGEMIDQGFLLARTAEEEIRRYPHWVILAPVTASIVVFRYCPLGLKDDDLDTLNLALSARLLAENVASILTTNIRGRVALRFCATNPATQADTITKVVQQMDQMANTMPTCGLGMCKE

SEQ ID NO: 1665 - protein, 523 aa, Alternaria panax
  source 1..523: note = Alternaria panax_ aromatic-L-amino-acid/L-tryptophan decarboxylase; KAG9194870.1
MDSSQFREAAKGAIDEIAKYYDTLEERPVLPSVKPGYLRPLLPSSTPEEGESWETIQADIDRVIMPGLTHWQSPKFMAFFPCNSSFEAMIGDMYSGAFNAAAFNWICSPAITELETVVMDWVAKLIALPKAFLSDGEGGGIIQGTASEVVLTALVAARERLIRRKVGDMPEGEERMDKAADIRGKLVALGSEYAHSSTQKAAVIAGTRYRSVPASKETNYSVTASALRKTIEECRAKGLEPFYFTVTIGSTGTCAIDDLEGIAALTKEFPDLWIHVDAAYAGSALVCPEYQHLCKPIASFDSFNFNLHKWLLVNFDCSAFFVKKRRDLMDTYSITPSYLRNPHSESGLVTDYRDWQIPLGRRFRSLKVWFVLRSYGVSGLRQFIRKHVKLGEYFHELLLSKPDLFDITTEPAFGLVTFQIKPKMASSTAAVAANQADPVHEALQNDFHADAEAQYKEMVNQKTKEVYENVNAKGDFFLTSTIVGGQYVIRVVSATLKSEEKWMKQLFDELVEVAEKKGGDKAT

SEQ ID NO: 1666 - protein, 527 aa, Talaromyces stipitatus
  source 1..527: note = Talaromyces stipitatus_Aromatic-L-amino-acid decarboxylase; tr|B8MNY7|B8MNY7_TALSN
MDREQFRAAAHAAIDDIINHFDSLPERRVLPTIEPGYLRPQIPENPPIEPQPWSEIQADIESKIQPGLTHWQSPNFMAFFPASVTYPSILGEMYSAAFTAPAFNWICSPACTELESIVMDWVAKALGLPKCFLSTSENRGGGVIQGTASESVATMLIAARERRARELTFAEGVKDNGSAEYEDHMCAHRAKLVALSSDQAHSSVAKAALVAGTRFRSIPTSLEDNVELTAKSLRATLTKVEEEQGLVPFFINFTMGTTNSCAVDRFAELKAVLNERESWRRIWVHIDAAYAGAALVEDEYQHIAQNFAEGVDSFNMNMHKWLLVNFDASCLFVRNRTDLTNALDITPAYLRNPYSETGTVVDYRNWQISLGRRFRSLKIWFVMRSYGLNGMKAHIRKGIKLGNLFAEKVQSRPELFEIVTKPAFALTVLRVRSSAASSAFTSNGTNGDNGTSEVAKHGVAQVDEKANEITKKVYELINSRGEVFLTSSVIAGIYVIRVVGVSPQADEAHTLRAFDILVKTTEEVLRG

SEQ ID NO: 1667 - protein, 374 aa, Fusarium redolens
  source 1..374: note = Fusarium redolens_monoamine oxidase ; KAH7240226.1
MLMWIPGQGRLLYDPAKTQGIPPLSEEDIATLADITIQLNEIASEIDVHQPWTHPKAKEWDRQTLSSWLDGFARDGTARGVIDMTNRAIMSAECEDVSLLSAVINVARTGDPETKGRMEMLTNVKNGSLEERIQGGPQNIATKLAERLGSDKVRLQAPVRQILQNDGTYLVVGDSFRVQASKVIIAIPPTLAGRIVYQPPLPAARDQLCQRVPMGSIGKVIAIYKTPFWRDQGLSGEVASLEGVSQSTFDSSPPDASFGALMGFLEANEMRRLDDASEEEIFAAVTEDFVRYFGPKAREVQSWVLQRWDNEEFSRGGHTGSFPPNVWTQFGPALTKPIGGIYFAGTEASSYWAGFMEGAVIAGEAAARKILSSS

SEQ ID NO: 1668 - protein, 480 aa, Aspergillus welwitschiae
  source 1..480: note = Aspergillus welwitschiae_monoamine oxidase ; RDH32955.1
MALQLLSLLCLILTTAAFPVSEVDVAIIGAGLSGLSAAKDLAAAGRSFAILEARDRVGGRVLNVELPGGIVEEVGAEFVGPTQDRVLALAAELGLTTYPTYNTGNCTLLRNGTITNYPCELGSGSLPPLPTEALIEVFTLQQQLNALAAEIDVQAPWDHPNASIWDTMTLETFLASQLTLSDARFLLNTFVTGILATEANEPSLLYMLAYIAASGNETEVGTLDRLIDVVGGAQESRIVGGTQLIALRLADRLGAENIHLRSPVQRVQHNNGRYMVISNGTRISAKRVVVAMSPPMAARISYDPPLPPARDQLTQRMGMGSIGKAIAIYPTPWWREQGGNAQALADTGILRITFDNTPADASFGAIMGFIVGDEMRRVDKMNETEIEAAVIDSFVGMFGPQAAHPDRVIVQRWDWEEYSRGGPVAYAPPSVLTDYGVQIRESVDGIYFAGTEASFYWTGYMDGAVRSGERVAAEVLRSLQ

SEQ ID NO: 1669 - protein, 935 aa, Aspergillus alliaceus
  source 1..935: note = Aspergillus alliaceus_cytochrome P450; XP_031893777.1
MYDISSQLVLKWDRLGPQHEIDMADDLTRLAFDTIGLCAFSYRFNEFYSEHMHLFAEQMGRVLLESGKRAFRLGVVNQVFAWSEQERQEDIHKMHAVADEIIADRKRNPQPENKDLLNTMLSVADPETGEKLSDENIRFNLVTFLIAGHETTSATLCFLYYNWLKNPLTLKKAQQEVDEVVGGSVLNVDHLPKLTYIDASIKETLRLSSPIPTFFVKPKNDTTVGERFKISSNTMVQCNMQGLHTDPAVWGDDAETFRPERMLNGGFASLPPNSWKPFGNGMRACIGRGFAEQEMLMNAALVLQRFQLEFADPSYELDVASTLTIKPRGFKIRVHRRPGKPAFFGVPGGGVVEAERKGINRSPNLDMIKSSRSPITILFGGNTGTCQSFALDLEDKLMCLGFVVTTKPLDAATQNLPTDRPVIVITASFEGNPPDNAKEFVEWLERAQEKDMLNGVQYAVFGVGNSDWPNTYHRIPRLVDSTMARLGASHILEIGVTDVKKDIIGPWEDWSEKLIQALAGPKTRAKGEAPSISVAIRPGELPQILGGKIVNIGTVINNYQLCGTEIGLAKRHMSIRLPEGQTYQAGDYLVVQPRNSEETARRVLRYFSISEHDTMVVQNSKKTFMPTKPVSVMEFLQNAVELGTPITKRQIEVLTTNTIKEHRAALEELKSEEIYPTLLDKRYSIIDVLEEYPSGLSFGTYIDMLQPLTPRQYSISSSPRHSTGSSYQVASITFDVHHSPARSGHGTFNGVASNYLATRCAGDQISCYTRPTSVGFRLPVDPDVPILMMAAGTGIAPMRAFLQERARIAEDGIQELAPAILFFGCRNDPMDFIYKNELRSWEDMGIVVVKLAFSRPSDGSTPQYIQDVIWENRQEVSDLFRRGGRIFVCGSAARLGRSVADVCIRIYLEETGQSDEEAEAWLQSVRTSRYISDVY

SEQ ID NO: 1670 - protein, 1067 aa, Aureobasidium melanogenum
  source 1..1067: note = Aureobasidium melanogenum_cytochrome P450; XP_040879924.1 BS
MSTPIPGPAGWPLLGNVNDIDPDVPIKSLMDIADKYGPIYSLSILGKRRVVVSSVELMNEICEERRFGKVVTAALGEVRNLTGDGLFTAHNGEQNWEIAHRVLIPAFGPLNIRGMFDDMRDIASQLVMKWARHGNDYKIHVTDDFTRLTLDTLALCSMDYRFNSFYAEQMHPFVDAMVNVLSESGSRIRRPGFLAALYRKEEYQYWKDIKYLRELSAELVQNRKKHPGSRKDLLHAMLHGKDPRDGSSLSDDSIIDNMITFLIAGHETTSGLLSFLFYYLLKNPSAYKKAQEEVDQVIGDATIKVEHLSKLPYINAVLRETLRLQPTAPAFSIQPNNEIDTIGGQYTVFRGEPIVALLPKIHRDVSVYGEDANDFKPERMLDENFNKLPPNAWKPFGNGSRACIGRPFAWQEAQLVVAMLLQYFDFTLDDAKYDLQIKSTLTIKPNHLYMHAKLRHGRTPTQLEQILSSNGAPTPAKQTHKSDVETATSAASDGNARPLTILYGSNTGTCQAFAQGLAADAPSHGFKVTKIDTLDSAKDNLPTDQAVAIITCSYEGEPADNAAHFFHWLKSLEGNSVKTQYAVFGAGHSDWKNTFHKIPTAIDDILLARGGERICSRGSANAANGDMFSEFEKWEDEVFWPAMSKKYGGDGGATDSAATQSLTVEVSSVRSSHLRADVYEARVVDAKLLSQPGSSEKRHIEIELPASVTYSSGDYLHVLPINPHESVQRVMRRFNLAWDSVLTIKAAVGTILPTNVPISANDLFGAYVELGQPATKRNVTLLLDACTDDETKKELTRLTGDAFSTEISEKRVSLLDLLNRFPSVQLPLGAFISSLPPMRTRSYSISSSSLVSPHRVTLTYAVLHQSHMSGMGEYVGVASNYLSKLATGDKLHVAVRPSNQAFHLPTDYEKTPVIMICAGTGLAPFRGFVQERAAQVEAGRKLAPALLVIGCRSPDQDELYREDFDLWEAKGAVKILRAYSRKPEASGGSKYAQDALWEHRQEARELWDAGSRVYVCGSRALERSVEKVCKAIYVERAKELGKDKTEQEAEEWFEGTRTLRFATDVFN

SEQ ID NO: 1671 - protein, 1081 aa, Aspergillus flavus
  source 1..1081: note = Aspergillus flavus_cytochrome P450; QRD94506.1
MMRELRERLLCPGAVLRSNYPVTKMRRLLKMRQNDNEKQICPIPGPQGLPFLGNILDIDLDNGTMSTLKIAKTYYPIFKFTFAGETSIVINSVALLSELCDETRFHKHVSFGLELLRSGTHDGLFTAYDHEKNWELAHRLLVPAFGPLRIREMFPQMHDIAQQLCLKWQRYGPRRPLNLVDDFTRTTLDTIALCAMGYRFNSFYSEGDFHPFIKSMVRFLKEAETQATLPSFISNLRVRAKRRTQLDIDLMRTVCREIVTERRQTNLDHKNDLLDTMLTSRDSLSGDALSDESIIDNILTFLVAGHETTSGLLSFAVYYLLTTPDAMAKAAHEVDDVVGDQELTIEHLSMLKYLNAILRETLRLMPTAPGFSVTPYKPEIIGGKYEVKPGDSLDVFLAAVHRDPAVYGSDADEFRPERMFDEHFQKLPANSWKPFGNGKRSCIGRAFAWQEALMILALILQSFSLDLVDRGYTLKLKESLTIKPDNLWAYATPRPGRNVLHARLALQTNSTHPEGLMSLKHETVESQPATILYGSNSGTCEALAHRLAIEMSSKGRFVCKVQPMDAIEHRRLPRGQPVIIVTGSYDGRPPENARHFVKWLQSLEGNDLEGIQYAVFGCGHHDWSTTFYKIPTLIDTTMAEHGGARLAPRGSADTAEDDPFAELESWSERSVWPGLEAAFNLARHNSSDGTGKSTRITIRSPYTLRAAHETAVVHQVRVLTSAETTKKVHVELALPDTMNYRPGDHLAILPLNSRQSVQRVLSLFQIGSDTILYITSSSATSLPTDTPISAHDLLSGYVELNQVATPTSLRSLAAKATDEKTAEYLEALATDRYTTEVRGNHLSLLDILESYSVPSIEIQHYIQMLPLLRPRQYTISSSPRLNRGQASLTVSVMERADVGGPRNCAGVASNYLASCTPGSILRVSLRQANPDFRLPDESCSHPIIMVAAGSGIAPFRAFVQERSVRQKEGIILPPAFLFFGCRRADLDDLYREELDAFEEQGVVTLFRAFSRAQSESHGCKYVQDLLWMERVRVKTLWGQDAKVFVCGSVRMNEGVKAIISKIVSPTPTEELARRYIAETFI

SEQ ID NO: 1672 - protein, 597 aa, Ustilago hordei
  source 1..597: note = Ustilago hordei_related to Cytochrome P450; SYW74180.1
MSTKVSDNVLRWAHSHPIAAGILGLLLVATLYIGLKDATKGPSVWAHFPGPERSSYLLGYSRDSKKKFGVKNPKALDREPIIGDAGTDITDDPGVSNARLFEEHNTDHLVLPRPLGGELLVTRDAATMNHVLNDSYNYTRSSAGTKATKIIIGNGIVAVFGDGHKKQRRMLAPAFSVDSLKQLMPIFTHATNQMMDRFEKDTSLEKRWGHGVKDTVKWFGRVTLDIIGRAGFDYDFGAVEQGPNGEAVRSTFHAAMTSTMNVKPLDAIVGAFMFFVVPSLLYILPLTDNVRKLREMRSELIKTSQKIVEAKAKQIRKELEAGVDAKETFGGRKDILHLLMRANMSPDIREEDRLSDEVLAGQIITFIFAGHETTATTMSWCTYLLALNPEYQRKLRGKMQSALGALGKDGEAIGDLTYADLNSEEMRPLDHCIQETLRLRPPVVTTFRYCKKDDQLAVTRPFNTKDGRTLSSIPVTAGREIAISVTGNNLDEKYFGPETHLFQPERWNNLPELHAKSKLPSPYGSFVFNGGPKVCIGSKFAMTEMKIIMIRTLAKYRIEPVEGLKYKSVEAVVQRPAVIGFEKEGSQLPLRFISDPL

SEQ ID NO: 1673 - protein, 501 aa, Levilactobacillus brevis
  source 1..501: note = Levilactobacillus brevis_glutamate: gamma-aminobutyrate antiporter; ODP94174.1
MDENKSEQQIDTQKANRITGFQLFSMTTSMVMTVYGFAAFAKQGPTAFFYLFLAGILWFLPVTRTSGEMASIDGWSKGGIFTWSRNMLGERAGWSALFYQWIHITVGMNTMMYFIIGCFSVTFGLPIITDNPLVKFILMMIILWGLIFLQQKGTSVTGKIAQWCFTLGVIIPVFFLLFLFILYLVQGNPAMIHVNMHTIFPSSWNGSVLVGFVPFILAFAGAEGSAPHVKDLDKPSIYPKVMMALAVAAICSDIIGSMAIAMTIPNNQIQLSNGIVYAYGALVARYGVGVVFVEKLTGFLLAVGVLGEISSWVVGPNAGMFEAAKAGYLPPRFSKANKYGIETNVMVLQGVIVSIVGALLTFGAGGNKASLSFQTAMSLTVALYTLMYMLMFISYLVLQFKYVDLHRDFVAAKSRWLRITYGILGFILSAFGFVVTFFPPADLSVASKHTYLMLLVSAFVVMLVLPFILYRFHDKWALQLGVNVDEVAAPTGHEALEKETK

SEQ ID NO: 1674 - protein, 469 aa, Levilactobacillus brevis
  source 1..469: note = Levilactobacillus brevis_glutamate decarboxylase; lcl|NZ_LS483405.1_pro
MINNVDLEKTFLGSVEAGQSLPTNTLPDDPMAPDVAAQLVEHYRLNEAKANQNLATFCTTQMEPQADELMKNALNTNAIDKSEYPKTAAMENYCVSMIAHLWGIPDNEKIYDDFIGTSTVGSSEGCMLGGLALLHSWKHRAKAAGFDIEDLHSHKPNLVIMSGYQVVWEKFCTYWNVEMRQVPINGDQVSLDMDHVMDYVDENTIGIIGIEGITYTGSVDDIQTLDNLVSEYNKTATMPVRIHVDAAFGGLFAPFVDGFNPWDFRLKNVVSINVSGHKYGMVYPGLGWIVWRHNTADILPAEMRFQVPYLGKTVDSIAINFSHSGAHISAQYYNFIRFGLSGYKTIMQNVRKVSLKLTAALKTYGIFDILVDGSQLPINCWKLADDAPVGWTLYDLESELAKYGWQVPAYPLPKNRDDVTISRIVVRPSMTMTIADDFLDDLKLAIDGLNHTFGVTTTVDQDNKTTVRS

SEQ ID NO: 1675 - protein, 458 aa, Pseudomonas aeruginosa
  source 1..458: note = Pseudomonas aeruginosa_gamma-glutamate-putrescine-synthetase; tr|A0A072ZGE6|A0A072ZGE6_PSEAI
MSVPQRAVQLTEPSEFLKEHPEVQFVDLLIADMNGVVRGKRIERNSLNKVFEKGINLPASLFALDITGSTVESTGLGLDIGDADRICYPIPGTLSMEPWQKRPTAQLLMTMHELEGEPFFADPREVLRQVVARFTEMELTIVAAFELEFYLIDQENVNGRPQPPRSPISGKRPQSVQVYSIDDLDEYVECLQDIIDGARAQGIPADAIVAESAPAQFEVNLNHVNDALKACDHAVLLKRLVKNIAYDHEMDTTFMAKPYPGQAGNGLHVHISLLDKHGNNIFTSEDPEQNAALRHAIGGVLETLPASMAFLCPNVNSYRRFGSQFYVPNAPSWGLDNRTVALRVPTGSPDAVRLEHRVAGADANPYLLLAAVLAGVHHGLTNKVEPGAPIEGNSYEQMEPSLPNNLRDALRELDESEIMAKYIDPKYIDIFVACKESELEEFEHSISDLEYNWYLHTV

SEQ ID NO: 1676 - protein, 491 aa, Pseudomonas sp.
  source 1..491: note = Pseudomonas sp. THAF7b_gamma-Glutamyl-oxidase; tr|A0A5P9JHY6|A0A5P9JHY6_9PSED
MPALSAIPECCWSASAPPGDFPRLTGDSRCDVVVIGAGIVGLSAAMTLCEAGKSVVVLEAREVGGQVTGRSTAKITTQHALIYRYLIDTFGQELAQCYADANREAVERIRHWVTSHAIDCDYQRQSAFAYACSADWRSAIEEEAEAARRLGFSARVVDQPPLPFATAGALEFPDQAQFNPTRYLIGLANTLQARGGRIHQHTRAKSFERQERWRVGFDNGSVEADQVILATHMPVETPIDLVSPTQPRCHVAMAFRPQAGARLEGMFIGIDEPTHSIRMARDDEGPLFIVLGPRFRTGQDGNVAQRFVDLEHWAQRNLPVGEAVWSWCNEDYDTADRMAYVGEPDREQSPGLFVATGFNGWGISNGTAAGLGIARQIITGRRPWKHLYDPNRPSPDNFNQSSDSHSLVDDLDSIAPGEGGVVTRGDEKLAVWRDDAGILHAVSAACTHMGCSVTWNNADRTWDCPCHGSIFQADGEVIHGPAIEPLAARSL

SEQ ID NO: 1677 - protein, 496 aa, Pseudomonas fluorescens
  source 1..496: note = Pseudomonas fluorescens_gamma-glutamyl-gamma-butyraldehyde dehydrogenase; tr|A0A5E6WVJ9|A0A5E6WVJ9_PSE
MTNTRSDWEQRFQSLTIEGRAFIDGQYCAAASGATFECISPVDGRFLANVASTDEADANAAVAVARRTFESGVWANLAPAERKRILIRFADLILANQEELALLETLDMGKPISDSMSIDIPATANAIRWTAEAIDKIYDEVAATPQDQLGLVTREAAGVVAAIVPWNFPLIMASWKFAPALAMGNSFILKPSEKSPLTAIRIAQLALDAGIPKGVFNVLPGYGHTVGKALALHMDVDVLAFTGSTAIAKQLMVYAGQSNMKRVWAEAGGKSPNVVFADAPDLRAAAQAAASGIAFNQGEVCTAGSRLLVERSIREQFIPLLVEALQAWKPGHALDPATTVGAVVDQRQLDNVLRYIGIGKEQGAELIAGGSRTLEDTGGLYVEPAIFDGVTNAMTIAREEIFGPVLSVITFDTFDEALAIANDSIFGLAAGVWTSNLSKAHTFARGLRAGSVWVNQYDGGDMTAPFGGFKQSGNGRDKSLHAFDKYTELKATWIKL

SEQ ID NO: 1678 - protein, 250 aa, Pseudomonas aeruginosa
  source 1..250: note = Pseudomonas aeruginosa_gamma-Glu-GABA hydrolase; tr|A0A2R3ITT9|A0A2R3ITT9_PSEAI
MSRLPLIGVTACTKQIGLHPYHIAGDKYLRAVVNGAGGLPLIIPALGELLDQATLLDSIDGLLFTGSPSNVEPRHYSGAASEPGTLHDPDRDATTLPLVRAAIDAGIPVLGICRGFQEMNVAFGGSLHQKVHEVGTFMDHREPADQPLEVQYAPRHAMHVQSGGVLAGIGLPSEFQVNSIHGQGVDRLAPGLRVEALAPDGLVEAISVEGAKAFALGVQWHPEWQVLTNPNYLAIFQAFGKACGKRAGQR

SEQ ID NO: 1679 - protein, 459 aa, Enterobacter hormaechei
  source 1..459: note = Enterobacter hormaechei_Putrescine aminotransferase; tr|A0A156GLB7|A0A156GLB7_9ENTR
MNRLPSSASALACTAHALNLIEKRTLDHEEMKQLNREVIDYFKEHVNPGFLEYRKSVTAGGDYGAVEWQAGSLNTLVDTQGQEFIDCLGGFGIFNVGHRNPVVVSAVQNQLAKQPLHSQELLDPLRAMLAKTLAALTPGKLKYSFFSNSGTESVEAAIKLAKAYQSPRGKFTFIATSGAFHGKSLGALSATAKSTFRKPFMPLLPGFRHVPFGDINAMRIVLSECRKTGDDVAAVILEPIQGEGGVILPPQGYLPAVRQLCDEFGALLIFDEVQTGMGRTGKMFACEHENVQPDILCLAKALGGGVMPIGATVATEEVFSVLFDNPFLHTTTFGGNPLACAAALATINVLLEQNLPAQAEQKGDMLLDGFRQLGREYPDLVQDARGKGMLMAIEFVDNETGYSFASEMFRQRVLVAGTLNNSKTIRIEPPLTLTIEQCEQVLKAARKALAALRIAVTSA

SEQ ID NO: 1680 - protein, 474 aa, Pseudomonas fluorescens
  source 1..474: note = Pseudomonas fluorescens_Gamma-aminobutyraldehyde dehydrogenase; tr|A0A0B7D3S6|A0A0B7D3S6_PSEFL
MQTKLLINGQLVNGEGPAQPVLNPALGEVLVEINEASEAQVDAAVRAADNAFAEWSQTAPKDRSLLLLKLADAIEAHGEELARLESDNCGKPYSAALNDEIPAIADVFRFFAGASRCMSGSAGGEYLPGHTSMIRRDPVGVIASIAPWNYPLMMVAWKIAPALAAGNTVVLKPSEQTPLTALRLAELASEIFPAGVLNLVFGRGPTVGSPLVTHPKVRMVSLTGSIATGSNIISSTADSVKRMHMELGGKAPVIIFDDADIDAAVEGIRTFGFYNAGQDCTAACRIYAQQGIYDKFVEKLGAAVSSIKYGLQDDPSTELGPLITAQHRDRVASFVERAVAQPHIRLITGGKAVDGNGFFFEPTVLADAQQDDEIVRREVFGPVVSVTKFTDEAQALEWANDSDYGLASSVWTADVGRAHRMSARLQYGCTWVNTHFMLVSEMPHGGQKLSGYGKDMSMYGLEDYTTVRHVMFKH

SEQ ID NO: 1681 - protein, 258 aa, Escherichia coli
  source 1..258: note = Escherichia coli_Gamma-glutamyl-gamma-aminobutyrate hydrolase (Gamma-Glu-GABA hydrolase); tr|A0A1X3J1G0|A0A1X3J1G0_ECOL
MRLSMENIMNNPVIGVVMCRNRLKGHATQTLQEKYLNAIIHAGGLPIALPHALAEPSLLEQLLPKLDGIYLPGSPSNVQPHLYGENGDEPDADPGRDLLSMAIINAALERRIPIFAICRGLQELVVATGGSLHRKLCEQPELLEHREDPELPVEQQYAPSHEVQVEEGGLLSALLPECSNFWVNSLHGQGAKVVSPRLRVEARSPDGLVEAVSVINHPFALGVQWHPEWNSSEYALSRILFEGFITACQHHIAEKQRL

SEQ ID NO: 1682 - protein, 472 aa, Escherichia coli
  source 1..472: note = Escherichia coli_Gamma-glutamylputrescine synthetase PuuA; sp|P78061|PUUA_ECOLI
METNIVEVENFVQQSEERRGSAFTQEVKRYLERYPNTQYVDVLLTDLNGCFRGKRIPVSSLKKLEKGCYFPASVFAMDILGNVVEEAGLGQEMGEPDRTCVPVLGSLTPSAADPEFIGQMLLTMVDEDGAPFDVEPRNVLNRLWQQLRQRGLFPVVAVELEFYLLDRQRDAEGYLQPPCAPGTDDRNTQSQVYSVDNLNHFADVLNDIDELAQLQLIPADGAVAEASPGQFEINLYHTDNVLEACDDALALKRLVRLMAEKHKMHATFMAKPYEEHAGSGMHIHISMQNNRGENVLSDAEGEDSPLLKKMLAGMIDLMPSSMALLAPNVNSYRRFQPGMYVPTQASWGHNNRTVALRIPCGDRHNHRVEYRVAGADANPYLVMAAIFAGILHGLDNELPLQEEVEGNGLEQEGLPFPIRQSDALGEFIENDHLRRYLGERFCHVYHACKNDELLQFERLITETEIEWMLKNA

SEQ ID NO: 1683 - protein, 426 aa, Escherichia coli
  source 1..426: note = Escherichia coli_Gamma-glutamylputrescine oxidoreductase; sp|P37906|PUUB_ECOLI
MTEHTSSYYAASANKYAPFDTLNESITCDVCVVGGGYTGLSSALHLAEAGFDVVVLEASRIGFGASGRNGGQLVNSYSRDIDVIEKSYGMDTARMLGSMMFEGGEIIRERIKRYQIDCDYRPGGLFVAMNDKQLATLEEQKENWERYGNKQLELLDANAIRREVASDRYTGALLDHSGGHIHPLNLAIGEADAIRLNGGRVYELSAVTQIQHTTPAVVRTAKGQVTAKYVIVAGNAYLGDKVEPELAKRSMPCGTQVITTERLSEDLARSLIPKNYCVEDCNYLLDYYRLTADNRLLYGGGVVYGARDPDDVERLVVPKLLKTFPQLKGVKIDYRWTGNFLLTLSRMPQFGRLDTNIYYMQGYSGHGVTCTHLAGRLIAELLRGDAERFDAFANLPHYPFPGGRTLRVPFTAMGAAYYSLRDRLGV

SEQ ID NO: 1684 - protein, 495 aa, Escherichia coli
  source 1..495: note = Escherichia coli_NADP/NAD-dependent aldehyde dehydrogenase; sp|P23883|PUUC_ECOLI
MNFHHLAYWQDKALSLAIENRLFINGEYTAAAENETFETVDPVTQAPLAKIARGKSVDIDRAMSAARGVFERGDWSLSSPAKRKAVLNKLADLMEAHAEELALLETLDTGKPIRHSLRDDIPGAARAIRWYAEAIDKVYGEVATTSSHELAMIVREPVGVIAAIVPWNFPLLLTCWKLGPALAAGNSVILKPSEKSPLSAIRLAGLAKEAGLPDGVLNVVTGFGHEAGQALSRHNDIDAIAFTGSTRTGKQLLKDAGDSNMKRVWLEAGGKSANIVFADCPDLQQAASATAAGIFYNQGQVCIAGTRLLLEESIADEFLALLKQQAQNWQPGHPLDPATTMGTLIDCAHADSVHSFIREGESKGQLLLDGRNAGLAAAIGPTIFVDVDPNASLSREEIFGPVLVVTRFTSEEQALQLANDSQYGLGAAVWTRDLSRAHRMSRRLKAGSVFVNNYNDGDMTVPFGGYKQSGNGRDKSLHALEKFTELKTIWISLEA

SEQ ID NO: 1685 - protein, 459 aa, Escherichia coli
  source 1..459: note = Escherichia coli_Putrescine aminotransferase; sp|P42588|PAT_ECOLI
MNRLPSSASALACSAHALNLIEKRTLDHEEMKALNREVIEYFKEHVNPGFLEYRKSVTAGGDYGAVEWQAGSLNTLVDTQGQEFIDCLGGFGIFNVGHRNPVVVSAVQNQLAKQPLHSQELLDPLRAMLAKTLAALTPGKLKYSFFCNSGTESVEAALKLAKAYQSPRGKFTFIATSGAFHGKSLGALSATAKSTFRKPFMPLLPGFRHVPFGNIEAMRTALNECKKTGDDVAAVILEPIQGEGGVILPPPGYLTAVRKLCDEFGALMILDEVQTGMGRTGKMFACEHENVQPDILCLAKALGGGVMPIGATIATEEVFSVLFDNPFLHTTTFGGNPLACAAALATINVLLEQNLPAQAEQKGDMLLDGFRQLAREYPDLVQEARGKGMLMAIEFVDNEIGYNFASEMFRQRVLVAGTLNNAKTIRIEPPLTLTIEQCELVIKAARKALAAMRVSVEEA

SEQ ID NO: 1686 - protein, 474 aa, Escherichia coli
  source 1..474: note = Escherichia coli_Gamma-aminobutyraldehyde dehydrogenase; sp|P77674|ABDH_ECOLI
MQHKLLINGELVSGEGEKQPVYNPATGDVLLEIAEASAEQVDAAVRAADAAFAEWGQTTPKVRAECLLKLADVIEENGQVFAELESRNCGKPLHSAFNDEIPAIVDVFRFFAGAARCLNGLAAGEYLEGHTSMIRRDPLGVVASIAPWNYPLMMAAWKLAPALAAGNCVVLKPSEITPLTALKLAELAKDIFPAGVINILFGRGKTVGDPLTGHPKVRMVSLTGSIATGEHIISHTASSIKRTHMELGGKAPVIVFDDADIEAVVEGVRTFGYYNAGQDCTAACRIYAQKGIYDTLVEKLGAAVATLKSGAPDDESTELGPLSSLAHLERVGKAVEEAKATGHIKVITGGEKRKGNGYYYAPTLLAGALQDDAIVQKEVFGPVVSVTPFDNEEQVVNWANDSQYGLASSVWTKDVGRAHRVSARLQYGCTWVNTHFMLVSEMPHGGQKLSGYGKDMSLYGLEDYTVVRHVMVKH

SEQ ID NO: 1687 - protein, 585 aa, Saccharomyces cerevisiae
  source 1..585: note = Saccharomyces cerevisiae _Glutamate decarboxylase ; sp|Q04792|DCE_YEAST
MLHRHGSKQKNFENIAGKVVHDLAGLQLLSNDVQKSAVQSGHQGSNNMRDTSSQGMANKYSVPKKGLPADLSYQLIHNELTLDGNPHLNLASFVNTFTTDQARKLIDENLTKNLADNDEYPQLIELTQRCISMLAQLWHANPDEEPIGCATTGSSEAIMLGGLAMKKRWEHRMKNAGKDASKPNIIMSSACQVALEKFTRYFEVECRLVPVSHRSHHMLDPESLWDYVDENTIGCFVILGTTYTGHLENVEKVADVLSQIEAKHPDWSNTDIPIHADGASGGFIIPFGFEKEHMKAYGMERWGFNHPRVVSMNTSGHKFGLTTPGLGWVLWRDESLLADELRFKLKYLGGVEETFGLNFSRPGFQVVHQYFNFVSLGHSGYRTQFQNSLFVARAFSFELLNSSKLPGCFEIVSSIHESIENDSAPKSVKDYWEHPQAYKPGVPLVAFKLSKKFHEEYPEVPQAILSSLLRGRGWIIPNYPLPKATDGSDEKEVLRVVFRSEMKLDLAQLLIVDIESILTKLIHSYEKVCHHIELASEQTPERKSSFIYEMLLALASPQDDIPTPDEIEKKNKLKETTTRNYRGTC

SEQ ID NO: 1688 - protein, 471 aa, Saccharomyces cerevisiae
  source 1..471: note = Saccharomyces cerevisiae _ 4-aminobutyrate aminotransferase; sp|P17649|GABAT_YEAST
MSICEQYYPEEPTKPTVKTESIPGPESQKQLKELGEVFDTRPAYFLADYEKSLGNYITDVDGNTYLDLYAQISSIALGYNNPALIKAAQSPEMIRALVDRPALGNFPSKDLDKILKQILKSAPKGQDHVWSGLSGADANELAFKAAFIYYRAKQRGYDADFSEKENLSVMDNDAPGAPHLAVLSFKRAFHGRLFASGSTTCSKPIHKLDFPAFHWPHAEYPSYQYPLDENSDANRKEDDHCLAIVEELIKTWSIPVAALIIEPIQSEGGDNHASKYFLQKLRDITLKYNVVYIIDEVQTGVGATGKLWCHEYADIQPPVDLVTFSKKFQSAGYFFHDPKFIPNKPYRQFNTWCGEPARMIIAGAIGQEISDKKLTEQCSRVGDYLFKKLEGLQKKYPENFQNLRGKGRGTFIAWDLPTGEKRDLLLKKLKLNGCNVGGCAVHAVRLRPSLTFEEKHADIFIEALAKSVNEL

SEQ ID NO: 1689 - protein, 497 aa, Saccharomyces cerevisiae
  source 1..497: note = Saccharomyces cerevisiae _Succinate-semialdehyde dehydrogenase ; sp|P38067|UGA2_YEAST
MTLSKYSKPTLNDPNLFRESGYIDGKWVKGTDEVFEVVDPASGEIIARVPEQPVSVVEEAIDVAYETFKTYKNTTPRERAKWLRNMYNLMLENLDDLATIITLENGKALGEAKGEIKYAASYFEWYAEEAPRLYGATIQPLNPHNRVFTIRQPVGVCGIICPWNFPSAMITRKAAAALAVGCTVVIKPDSQTPLSALAMAYLAEKAGFPKGSFNVILSHANTPKLGKTLCESPKVKKVTFTGSTNVGKILMKQSSSTLKKLSFELGGNAPFIVFEDADLDQALEQAMACKFRGLGQTCVCANRLYVHSSIIDKFAKLLAERVKKFVIGHGLDPKTTHGCVINSSAIEKVERHKQDAIDKGAKVVLEGGRLTELGPNFYAPVILSHVPSTAIVSKEETFGPLCPIFSFDTMEEVVGYANDTEFGLAAYVFSKNVNTLYTVSEALETGMVSCNTGVFSDCSIPFGGVKESGFGREGSLYGIEDYTVLKTITIGNLPNSI

SEQ ID NO: 1690 - protein, 395 aa, Bacillus subtilis; identical to SEQ ID NO: 770
  source 1..395: note = Bacillus subtilis (strain 168)_Acetate kinase; sp|P37877|ACKA_BACSU

SEQ ID NO: 1691 - protein, 397 aa, Lactiplantibacillus plantarum; identical to SEQ ID NO: 776
  source 1..397: note = Lactiplantibacillus plantarum (strain ATCC BAA-793 / NCIMB 8826 / WCFS1)_Acetate kinase; sp|Q88V41|ACKA_LACPL

SEQ ID NO: 1692 - protein, 323 aa, Bacillus subtilis
  source 1..323: note = Bacillus subtilis (strain 168)_Phosphate acetyltransferase; sp|P39646|PTAS_BACSU
MADLFSTVQEKVAGKDVKIVFPEGLDERILEAVSKLAGNKVLNPIVIGNENEIQAKAKELNLTLGGVKIYDPHTYEGMEDLVQAFVERRKGKATEEQARKALLDENYFGTMLVYKGLADGLVSGAAHSTADTVRPALQIIKTKEGVKKTSGVFIMARGEEQYVFADCAINIAPDSQDLAEIAIESANTAKMFDIEPRVAMLSFSTKGSAKSDETEKVADAVKIAKEKAPELTLDGEFQFDAAFVPSVAEKKAPDSEIKGDANVFVFPSLEAGNIGYKIAQRLGNFEAVGPILQGLNMPVNDLSRGCNAEDVYNLALITAAQAL

SEQ ID NO: 1693 - protein, 401 aa, Clostridium acetobutylicum
  source 1..401: note = Clostridium acetobutylicum (strain ATCC 824 / DSM 792 / JCM 1419 / LMG 5710 / VKM B-1787)_Acetate kinase; sp|P71104|ACKA_CLOAB
MKNLVINCGSSSIKYQFIDMKDETVLAKGLVERIGIKGSVITHKVNGEKYVTETPMEDHKKAIKLVLDALLNDEYGVIKNIDEISAVGHRIVHGGEKYANSVLIDEDVMKSIEDCVSLAPLHNPPHIIGINACKELMPNVPMVAVFDTAFHQTIPDYAYMYAIPYEYYDKYKIRKYGFHGTSHKYVSRTAAEFIGKKVEDLKMVVCHMGNGASITAVENGKSVDTSMGFTPLGGLAMGTRSGDMDPAVVTFLMDKLNINASEVNNLLNKKSGIEGLSGISSDMRDIKKGNYVDKDPKAMLAYSVFNYKIKQFIGSYTAVMNGLDCLVFTGGIGENSFENRREICKNMDYLGIKIDDKKNDETMGIPMDISAEGSKVRVLVIPTNEELMIARDTKDIVGKLK

SEQ ID NO: 1694 - protein, 333 aa, Clostridium acetobutylicum
  source 1..333: note = Clostridium acetobutylicum (strain ATCC 824 / DSM 792 / JCM 1419 / LMG 5710 / VKM B-1787)_Phosphate acetyltransferase; sp|P71103|PTAS_CLOAB
MDLIESIWECAKQDKKRIILAEGEEKRNLIAADKIIKEGLAELVLVGDENKIKEKASELNLDISKAEIMDPETSLKTETYARDFYELRKHKGMTIEKSEKMVRDPLYFATMALKDGYVDGMVSGAVHTTGDLLRPGLQIIKTAPGVKIVSGFFVMIIPDCDYGEEGLLLFADCAVNPNPTSDELADIAITTAETARKLCNVEPKVAMLSFSTMGSAKGEMVDKVKNAVEITKKFRPDLAIDGELQLDAAIDSEVAALKAPSSNVAGNANVLVFPDLQTGNIGYKLVQRFAKAKAIGPICQGFAKPINDLSRGCSSEDIVNVVAITVVQAQRGI

SEQ ID NO: 1695 - protein, 572 aa, Escherichia coli
  source 1..572: note = Escherichia coli (strain K12)_Pyruvate dehydrogenase [ubiquinone]; sp|P07003|POXB_ECOLI
MKQTVAAYIAKTLESAGVKRIWGVTGDSLNGLSDSLNRMGTIEWMSTRHEEVAAFAAGAEAQLSGELAVCAGSCGPGNLHLINGLFDCHRNHVPVLAIAAHIPSSEIGSGYFQETHPQELFRECSHYCELVSSPEQIPQVLAIAMRKAVLNRGVSVVVLPGDVALKPAPEGATMHWYHAPQPVVTPEEEELRKLAQLLRYSSNIALMCGSGCAGAHKELVEFAGKIKAPIVHALRGKEHVEYDNPYDVGMTGLIGFSSGFHTMMNADTLVLLGTQFPYRAFYPTDAKIIQIDINPASIGAHSKVDMALVGDIKSTLRALLPLVEEKADRKFLDKALEDYRDARKGLDDLAKPSEKAIHPQYLAQQISHFAADDAIFTCDVGTPTVWAARYLKMNGKRRLLGSFNHGSMANAMPQALGAQATEPERQVVAMCGDGGFSMLMGDFLSVVQMKLPVKIVVFNNSVLGFVAMEMKAGGYLTDGTELHDTNFARIAEACGITGIRVEKASEVDEALQRAFSIDGPVLVDVVVAKEELAIPPQIKLEQAKGFSLYMLRAIISGRGDEVIELAKTNWLR

SEQ ID NO: 1696 - protein, 603 aa, Lactiplantibacillus plantarum
  source 1..603: note = Lactiplantibacillus plantarum (strain ATCC BAA-793 / NCIMB 8826 / WCFS1)_Pyruvate oxidase; sp|P37063|POXB_LACPL
MVMKQTKQTNILAGAAVIKVLEAWGVDHLYGIPGGSINSIMDALSAERDRIHYIQVRHEEVGAMAAAADAKLTGKIGVCFGSAGPGGTHLMNGLYDAREDHVPVLALIGQFGTTGMNMDTFQEMNENPIYADVADYNVTAVNAATLPHVIDEAIRRAYAHQGVAVVQIPVDLPWQQIPAEDWYASANSYQTPLLPEPDVQAVTRLTQTLLAAERPLIYYGIGARKAGKELEQLSKTLKIPLMSTYPAKGIVADRYPAYLGSANRVAQKPANEALAQADVVLFVGNNYPFAEVSKAFKNTRYFLQIDIDPAKLGKRHKTDIAVLADAQKTLAAILAQVSERESTPWWQANLANVKNWRAYLASLEDKQEGPLQAYQVLRAVNKIAEPDAIYSIDVGDINLNANRHLKLTPSNRHITSNLFATMGVGIPGAIAAKLNYPERQVFNLAGDGGASMTMQDLATQVQYHLPVINVVFTNCQYGFIKDEQEDTNQNDFIGVEFNDIDFSKIADGVHMQAFRVNKIEQLPDVFEQAKAIAQHEPVLIDAVITGDRPLPAEKLRLDSATSSAADIEAFKQRYEAQDLQPLSTYLKQFGLDDLQHQIGQGGF

SEQ ID NO: 1697 - protein, 683 aa, Saccharomyces cerevisiae
  source 1..683: note = Saccharomyces cerevisiae _Acetyl-coenzyme A synthetase 2 ; sp|P52910|ACS2_YEAST
MTIKEHKVVYEAHNVKALKAPQHFYNSQPGKGYVTDMQHYQEMYQQSINEPEKFFDKMAKEYLHWDAPYTKVQSGSLNNGDVAWFLNGKLNASYNCVDRHAFANPDKPALIYEADDESDNKIITFGELLRKVSQIAGVLKSWGVKKGDTVAIYLPMIPEAVIAMLAVARIGAIHSVVFAGFSAGSLKDRVVDANSKVVITCDEGKRGGKTINTKKIVDEGLNGVDLVSRILVFQRTGTEGIPMKAGRDYWWHEEAAKQRTYLPPVSCDAEDPLFLLYTSGSTGSPKGVVHTTGGYLLGAALTTRYVFDIHPEDVLFTAGDVGWITGHTYALYGPLTLGTASIIFESTPAYPDYGRYWRIIQRHKATHFYVAPTALRLIKRVGEAEIAKYDTSSLRVLGSVGEPISPDLWEWYHEKVGNKNCVICDTMWQTESGSHLIAPLAGAVPTKPGSATVPFFGINACIIDPVTGVELEGNDVEGVLAVKSPWPSMARSVWNHHDRYMDTYLKPYPGHYFTGDGAGRDHDGYYWIRGRVDDVVNVSGHRLSTSEIEASISNHENVSEAAVVGIPDELTGQTVVAYVSLKDGYLQNNATEGDAEHITPDNLRRELILQVRGEIGPFASPKTIILVRDLPRTRSGKIMRRVLRKVASNEAEQLGDLTTLANPEVVPAIISAVENQFFSQKKK

SEQ ID NO: 1698 - protein, 707 aa, Kluyveromyces lactis
  source 1..707: note = Kluyveromyces lactis_Acetyl-coenzyme A synthetase 1; sp|O60011|ACS1_KLULA
MSPAVDTASTAKDPISVMKSNASAAAADQIKTHEYEHLTSVPIVQPLPITDRLSSEAAQKYKPNLPGGFEEYKSLHKESLENPAKFYHERAQLLNWFKPYDQVFIPDTEGKPTFENNAWFTNGQLNACYNLVDRHAFTQPNKVAILYEADEPGQGYSLTYAELLEQVCKVAQILQYSMNVKKGDTVAVYMPMIPQALITLLAITRIGAIHSVVFAGFSSNSLRDRINDAYSKTVITTDESKRGGKTIETKRIVDEALKDTPQVTNVLVFKRTHNENIKYIPGRDLDWDEEVKKYKSYTPCEPVDSEHPLFLLYTSGSTGAPKGVQHSTAGYLLQALLSMKYTFDIQNDDIFFTAGDIGWITGHTYCVYGPLLQGCTTLVFEGTPAYPNFSRYWEIVDKYQVTQFYVAPTALRLLKRAGDSFTEGFSLKSLRSLGSVGEPIAAEVWEWYSEKIGKNELPIVDTYWQTESGSHLVTPLAGGATPMKPGAAAFPFFGIDLAVLDPTTGIEQTGEHAEGVLAIKRPWPSFARTIWKNNDRFLDTYLKPYPGYYFTGDGVARDKDGFFWILGRVDDVVNVSGHRLSTAEIEAAIIEDDMVAECAVVGFNDELTGQAVAAFVVLKNKSSLTAASESELQDIKKHLIITVRKDIGPFAAPKLIVLVDDLPKTRSGKIMRRILRKILAGESDQLGDVSTLSNPGIVKHLIDSVKL

SEQ ID NO: 1699 - protein, 662 aa, Schizosaccharomyces pombe [sequence omitted]

SEQ ID NO: 1700 - protein, 667 aa, Neurospora crassa
  source 1..667: note = Neurospora crassa_Acetyl-coenzyme A synthetase; sp|P16929|ACSA_NEUCR
MSGSTVPAGAVVPEAHTIETFQPPREMLQNHPSKPHLANFEEYQKLYKQSITEPNVFWAERARELLSWSKDFQTVHSGSLANGDNAWFVEGELNASYNCVDRHAHKDPNRVAIIYEADEPGQGRNVTYGELLREVSKLAHVLTNLGVRKGDTVAIYLPMIPEAIVAMLACTRIGAIHSVVFAGFSSDSLRDRVVDAQSKVVITTDEGKRGGKLIGTKKIVDEALQQCPDVRNVLVYKRTGADISMTPGRDLWWHEEVEKYPAYYTPVAMASEDPLFLLYTSGSTGKPKGVAHSTGGYLLGAAMTGKYVFDIHDGDRYFCGGDVGWITGHTYVLYAPLLLGVSTVVFEGTPAYPNFSRYWDIIEEHKVTQFYVAPTALRLLKRAGDHHVRNEMKHLRVLGSVGEPIAAEVWKWYYDVVGKGRAQICDTYWQTETGSNVITPLAGVTPTKPGSASFPFFGIEPALVDPVTGEEIHGNDVEGVLAFKQPWPSMARTVWGAHKRYMETYLHVYKGYYFTGDGAARDHEGFYWIRGRVDDVVNVSGHRLSTAEIEAALIEHHSIAEAAVVGVADELTGQAVNAFVAVKEGTQINDALRKEFVLQVRRSIGPFAAPKAIYIVPDLPKTRSGKIMRRILRKIVAGEEDQLGDITTLSDPSVVAKIIDVVHAQRQ

SEQ ID NO: 1701 - protein, 669 aa, Penicillium chrysogenum
  source 1..669: note = Penicillium chrysogenum_Acetyl-coenzyme A synthetase; sp|P36333|ACSA_PENCH
MSDGPIQPPKPAVVHEAHEVDTFHVPKAFHDKHPSGTHIKDIEEYKKLYEESIKSPDTFWARMARELLTFDKDFETTHHGSFENGDNAWFVEGRLNASFNCVDRHALKNPDKVAIIYEADEPNEGRKITYGELMREVSRVAWTLKERGVKKGDTVGIYLPMIPEAVIAFLACSRIGAVHSVVFAGFSSDSLRDRVLDASSKVIITSDEGKRGGKIIGTKKIVDEAMKQCPDVHTVLVYKRTGAEVPWTAGRDIWWHEEVEKYPNYLAPESVSSEDPLFLLYTSGSTGKPKGVMHTTAGYLLGAAMTGKYVFDIHDDDRYFCGGDVGWITGHTYVVYAPLLLGCATVVFESTPAYPNFSRYWDVIDKHDVTQFYVAPTALRLLKRAGDEHIHHKMHSLRILGSVGEPIAAEVWKWYFECVGKEEAHICDTYWQTETGSHVITPLGGITPTKPGSASLPFFGIEPAIIDPVSGEEIVGNDVEGVLAFKQPWPSMARTVWGAHKRYMDTYLNVYKGYYFTGDGAGRDHDGYYWIRGRVDDVVNVSGHRLSTAEIEAALLEHPSVAEAAVVGIADELTGQAVNAFVSLKEGKPTEQISKDLAMQVRKSIGPFAAPKAVFVVDDLPKTRSGKIMRRILRKILSGEEDSLGDTSTLSDPSVVDKIIETVHSARQK

SEQ ID NO: 1702 - protein, 679 aa, Debaryomyces hansenii
  source 1..679: note = Debaryomyces hansenii _Acetyl-coenzyme A synthetase 2; sp|Q6BS00|ACS2_DEBHA
MTSSPTHQVVHEANNIKKQETPKEFFERQPRQGHITSLEQYQELYEKSINDPETFFGEFGKELLHWDRDFERVKSGSLLHGDAAWFIGGQLNACYNCVDRHAFATPNKPAIIYEADEEKDSKILTFAELLREVCQVAGVLQSWGIKKGDTVAIYMPMNSQAIIAMLAVARLGAIHSVIFAGFSSGSIKDRVNDASCKALITCDEGRRGGKTINIKKLCDEALLNCPSIEKVLVYERTGNKEVTLKEGRDYWWSEETQKFAGYLPPVPVNSEDPLFLLYTSGSTGTPKGVVHSTAGYLLGAALTTKYVFDIHPEDVLFTAGDVGWITGHTYALYGPLSLGVPTVVFEGTPAFPDYGRLWQIVEKHKATHFYVAPTALRLLRKSGEQEIEKYDLSSLRTLGSVGEPISPDIWEWYNEKVGKGQCHVTDTYWQTESGSHFIAPIAGVVPNKPGSAAVPFFGIQTCLIDPVSGIEIQGNDVEGVLAVKDTWPSMARSVYKNHTKYMDTYLNPYPGYYFTGDGAARDHDGYYWIRGRVDDVVNVSGHRLSTAEIEAALIEHNAISEAAVVGMNDDLTGQTVVAFVALKEHLIANLKADESPEEALKLKKEMILQVRTQIGPFAAPKSVIIVEDLPKTRSGKIMRRILRKIAAGEADQLGDITTLSNPQSVAGIIGSFDSQFGKK

SEQ ID NO: 1703 - protein, 704 aa, Candida glabrata
  source 1..704: note = Candida glabrata _Acetyl-coenzyme A synthetase 1 ; sp|Q6FLU2|ACS1_CANGA
MSPSAIAEKKQVDNIQEIKDKNQEPAHHEYEHLTNVGVVKQKPIDHRLKDNIKTHYSPHLDGLQEYKRQYQESIENPEKFFSEKARSFMNWFRDFDRVFVPDVDNPTKPSFENNAWFLNGQLNTCYNCVDRHALKTPNKTAIIYEADEPGEGYSMSYKELLEKVCQVAQILKYSMNVKKGDTVAVYMPMIPEALITLLAISRIGAIHSVVFAGFSSNSLRDRINDAGSRVVITADESNRGGKIIETKRIVDDALRETPQVEHVLVYRRTNNPQVNFQAPRDLDWETERKKYKTYFPCEPVDSEHPLFLLYTSGSTGTPKGVQHSTAGYLLGALLTMRYTFDVHQEDVFFTAGDIGWITGHTYCVYGPLLYGCTTLVFEGTPAYPNFSRYWEIIDKHQVTQFYVAPTALRLLKRAGDSFIDGFSLKSLRCLGSVGEPIAAEVWEWYSDKIGKNEIPIVDTYWQTESGSHLVTPLAGGVTPMKPGSASLPFFGIETVILDPTTGEEINDSHAEGVLAIKRPWPSFARTIWKNHDRFLDTYLNPYKGYYFTGDGAARDKDGYIWILGRVDDVVNVSGHRLSTAEIEAAIIEDRMVAECAVVGFNDDLTGQAVAAFVVLKDKSTWASASEEELQDIKKHLILTVRKDIGPFAAPKLIVLVDDLPKTRSGKIMRRILRKILAGESDQLGDVSTLSNPGVVKHLIDSVKL

SEQ ID NO: 1704 - protein, 684 aa, Kluyveromyces lactis
  source 1..684: note = Kluyveromyces lactis_Acetyl-coenzyme A synthetase 2 ; sp|Q9Y7B5|ACS2_KLULA
MSSDKLHKVVHEAHDVEARHAPEHFYNSQPGKSYCTDEEHYREMYTQSIEDPAGFFGPLAKEYLDWDRPFTQVQSGSLEHGDIAWFLNGELNASYNCVDRHAFANPDKPALIYEADDESENKVITFGELLRQVSEVAGVLQSWGVKKGDTVAVYLPMIPAAVVAMLAVARLGAIHSVIFAGFSAGSLKERVVDAGCKVVITCDEGKRGGKTVHTKKIVDEGLAGVDSVSKILVFQRTGTQGIPMKPARDFWWHEECVKQRGYLPPVPVNSEDPLFLLYTSGSTGSPKGVVHSTAGYLLGSALTTRFVFDIHPEDVLFTAGDVGWITGHTYALYGPLTLGTATIIFESTPAYPDYGRYWRIIERHRATHFYVAPTALRLIKRVGEEEIAKYDTSSLRVLGSVGEPISPDLWEWYHEKVGKNNCVICDTMWQTESGSHLIAPLAGAVPTKPGSATVPFFGINACIIDPVSGEELKGNDVEGVLAVKSPWPSMARSVWNNHARYFETYLKPYPGYYFTGDGAGRDHDGYYWIRGRVDDVVNVSGHRLSTAEIEAALAEHEGVSEAAVVGITDELTGQAVIAFVSLKDGYLSENAVEGDSTHISPDNLRRELILQVRGEIGPFAAPKTVVVVNDLPKTRSGKIMRRVLRKVASKEADQLGDLSTLANADVVPSIISAVENQFFSQQKK

SEQ ID NO: 1705 - protein, 671 aa, Debaryomyces hansenii
  source 1..671: note = Debaryomyces hansenii_Acetyl-coenzyme A synthetase 1; sp|Q6BQF2|ACS1_DEBHA
MTPHSTHVTLDHEGIIQPPAEFKERSKSKPNLADFETYSKMYKESIENPSKFFGEQALEHLSWDRPFDEARYPVSSEQDFADGDIASWFVNGQLNASYNAVDRWAIKNPNKPAIIYEADEENEGRIITYGQLLKDVCKLAQCLTKLGIRKGDSVAVYLPMIPEALVTLLAIVRIGAVHSVVFAGFSSSSLKDRILDASSKIVITTDESKRGGKTIETKKIVDDALKNCPDVTNVLLFKRTGNAHIPFTEGRDLWWHEEMAKYGPYFPPVPVNSEDPLFLLYTSGSTGKPKGIQHSTAGYLLGAAMTSKYTFDVHEDDVLFTAGDVGWITGHTYVVYGPLLCGATTVVFEGTPAHPNYSRYWEIVDKYQVTQFYVAPTALRLLKRAGTKYIENYKLDSLRVLGSVGEPIAAEIWHWYNDNIGRRKCHIVDTYWQTESGSHMLAPLAGITPTKPGSASLPCFGIDAKILDPVSGKELKENDVEGVLCVKSCWPSISRGIYNDYARFIETYLKPYPNHYFSGDGAARDVDGFYWILGRVDDVVNVSGHRLSTAEIEAALILHESVAECAVVGYADELTGQAVAAYVSLKSNVSEDLEVIKKELILTVRKEIGPFATPKTILLVDDLPKTRSGKIMRRILRKVLAGEEDQLGDISTLSNPGVVAQIIDVVKATRK

SEQ ID NO: 1706 - protein, 675 aa, Zygosaccharomyces bailii
  source 1..675: note = Zygosaccharomyces bailii_Acetyl-coenzyme A synthetase 2; sp|Q96VC7|ACS2_ZYGBA
MTVKEHKVVHEAQNVEALHAPEHFYKSQPGPSYIKDMKQYKEMYKQSVEDPENFFGEKARELLDWDRPFTRSKYGSLENGDVTWFLNGELNAAYNCVDRHAFANPDKPALIYEADEEADNRMITFSELLRQVSRVAGVLQSWGVKKGDTVAVYLPMIPEAVVAMLAIARLGAIHSVVFAGFSAGSLKDRVVDAGCKVVITCDEGKRGGKTVHTKKIVDEGLNGISLVSHILVFQRTGSEGIPMTAGRDYWWHEETAKQRSYLPPVPCNSEDPLFLLYTSGSTGSPKGVVHSTAGYLLGAAMTTRYVFDIHPEDVLFTAGDVGWITGHTYALYGPLVLGTASIIFESTPAYPDYGRYWRIIQRHKATHFYVAPTALRLIKRVGEAEIPKYDISSLRVLGSVGEPISPELWEWYYEKVGNKNCVICDTMWQTESGSHLIAPQAGAVPTKPGSATVPFFGVDACIIDPVTGIELQGNDVEGVLAVKSSWPSMARSVWQNHHRYVDTYLKPYPGYYFTGDGAGRDHDGYYWIRGRVDDVVNVSGHRLSTAEIEASLTNHDNVSESAVVGIADELTGQSVIAFVSLKDGSSRESSAVVAMRRELVLQVRGEIGPFAAPKCVILVKDLPKTRSGKIMRRVLRKVASNEADQLGDLSTMANSEVVPSIIAAVDEQFFAEKKK

SEQ ID NO: 1707 - protein, 348 aa, Saccharomyces cerevisiae
  source 1..348: note = Saccharomyces cerevisiae_Alcohol dehydrogenase 1 ; sp|P00330|ADH1_YEAST
MSIPETQKGVIFYESHGKLEYKDIPVPKPKANELLINVKYSGVCHTDLHAWHGDWPLPVKLPLVGGHEGAGVVVGMGENVKGWKIGDYAGIKWLNGSCMACEYCELGNESNCPHADLSGYTHDGSFQQYATADAVQAAHIPQGTDLAQVAPILCAGITVYKALKSANLMAGHWVAISGAAGGLGSLAVQYAKAMGYRVLGIDGGEGKEELFRSIGGEVFIDFTKEKDIVGAVLKATDGGAHGVINVSVSEAAIEASTRYVRANGTTVLVGMPAGAKCCSDVFNQVVKSISIVGSYVGNRADTREALDFFARGLVKSPIKVVGLSTLPEIYEKMEKGQIVGRYVVDTSK

SEQ ID NO: 1708 - protein, 350 aa, Schizosaccharomyces pombe
  source 1..350: note = Schizosaccharomyces pombe_Alcohol dehydrogenase; sp|P00332|ADH_SCHPO
MTIPDKQLAAVFHTHGGPENVKFEEVPVAEPGQDEVLVNIKYTGVCHTDLHALQGDWPLPAKMPLIGGHEGAGVVVKVGAGVTRLKIGDRVGVKWMNSSCGNCEYCMKAEETICPHIQLSGYTVDGTFQHYCIANATHATIIPESVPLEVAAPIMCAGITCYRALKESKVGPGEWICIPGAGGGLGHLAVQYAKAMAMRVVAIDTGDDKAELVKSFGAEVFLDFKKEADMIEAVKAATNGGAHGTLVLSTSPKSYEQAAGFARPGSTMVTVSMPAGAKLGADIFWLTVKMLKICGSHVGNRIDSIEALEYVSRGLVKPYYKVQPFSTLPDVYRLMHENKIAGRIVLDLSK

SEQ ID NO: 1709 - protein, 350 aa, Emericella nidulans
  source 1..350: note = Emericella nidulans_Alcohol dehydrogenase 1; sp|P08843|ADH1_EMENI
MSIPTMQWAQVAEKVGGPLVYKQIPVPKPGPDQILVKIRYSGVCHTDLHAMMGHWPIPVKMPLVGGHEGAGIVVAKGELVHEFEIGDQAGIKWLNGSCGECEFCRQSDDPLCARAQLSGYTVDGTFQQYALGKASHASKIPAGVPLDAAAPVLCAGITVYKGLKEAGVRPGQTVAIVGAGGGLGSLAQQYAKAMGIRVVAVDGGDEKRAMCESLGTETYVDFTKSKDLVADVKAATPDGLGAHAVILLAVSEKPFQQATEYVRSRGTIVAIGLPPDAYLKAPVINTVVRMITIKGSYVGNRQDGVEALDFFARGLIKAPFKTAPLKDLPKIYELMEQGRIAGRYVLEMPE

SEQ ID NO: 1710 - protein, 339 aa, Aspergillus sp.
  source 1..339: note = Aspergillus sp._Alcohol dehydrogenase notN; sp|E1ACQ9|NOTN_ASPSM
MSLPQTYKRAVFKELGHPLTVEDAPLKLPGPNELLIKVEACGVCYSDMYSQYNGLGGGFPIVPGHEIIGKVAVVGSEVRDWNVGQRIGAGWHGGHDGTCKACKQGYFQMCDSTAVNGATKEGGYAEYTLIRSESAVHIPANVDAASYAPILCAGLTVFNSIRNVNIRAGETVAVQGLGGLGHLAIQYAKRMGYRVVAISRGPEKEAAARELGADEYIDSNEGDSGEQLAALGGAALAVTTASTGEAITPLLKGLGILGKLLVLSFPSNLTLEPTDLLKYGLSVHFWPSGHPSDAEDAVRFAENTNIASVVEKFPLEQAQQAFESMLSGKVRFRAVITMD

SEQ ID NO: 1711 - protein, 350 aa, Aspergillus flavus
  source 1..350: note = Aspergillus flavus_Alcohol dehydrogenase 1 ; sp|P41747|ADH1_ASPFN
MSIPEMQWAQVAEQKGGPLIYKQIPVPKPGPDEILVKVRYSGVCHTDLHALKGDWPLPVKMPLVGGHEGAGVVVARGDLVTEFEIGDHAGLKWLNGSCLACEFCKQADEPLCPNASLSGYTVDGTFQQYAIGKATHASKLPKNVPLDAVAPVLCAGITVYKGLKESGVRPGQTVAIVGAGGGLGSLALQYAKAMGIRVVAIDGGEEKQAMCEQLGAEAYVDFTKTQDLVADVKAATPEGLGAHAVILLAVAEKPFQQAAEYVRSRGTVVAIGLPAGAFLRAPVFNTVVRMINIKGSYVGNRQDGVEAVDFFARGLIKAPFKTAPLQDLPKIFELMEQGKIAGRYVLEIPE

SEQ ID NO: 1712 - protein, 353 aa, Neurospora crassa
  source 1..353: note = Neurospora crassa_Alcohol dehydrogenase 1 ; sp|Q9P6C8|ADH1_NEUCR
MPQFEIPEQQWAQVVEKKGGPVVFKQIPVQKPGPDEVLINVKYSGVCHTDLHAMKGDWPLATKMPLVGGHEGAGVVVAKGELVTEVEVGDHAGIKWLNGSCLACSFCMQADEPLCPHALLSGYTVDGSFQQYAIAKAAHVAKIPKGCDLETTAPVLCAGITVYKGLKESGVRPGQCVAIVGAGGGLGSMAIQYANAMGLHAIAIDGGEEKGKNCRELGAQAYVDFTTTKDLVADVKAATPDGLGPHAVILLAVSEKPFHQAVDYVRSRGTIICIGLPAGAKFQAPVFDTVIRMITIKGSYVGNRQDTQEALDFFARGLIKVPIKTVGLSKLQEVYDLMEEGKIVGRYVVDTSK

SEQ ID NO: 1713 - protein, 520 aa, Saccharomyces cerevisiae; identical to SEQ ID NO: 1115
  source 1..520: note = Saccharomyces cerevisiae_Aldehyde dehydrogenase 5, mitochondrial ; sp|P40047|ALDH5_YEAST

SEQ ID NO: 1714 - protein, 420 aa, Saccharomyces cerevisiae
  source 1..420: note = Saccharomyces cerevisiae_ Isocitrate dehydrogenase [NADP]; sp|P53982|IDHH_YEAST
MSKIKVVHPIVEMDGDEQTRVIWKLIKEKLILPYLDVDLKYYDLSIQERDRTNDQVTKDSSYATLKYGVAVKCATITPDEARMKEFNLKEMWKSPNGTIRNILGGTVFREPIIIPKIPRLVPHWEKPIIIGRHAFGDQYRATDIKIKKAGKLRLQFSSDDGKENIDLKVYEFPKSGGIAMAMFNTNDSIKGFAKASFELALKRKLPLFFTTKNTILKNYDNQFKQIFDNLFDKEYKEKFQALKITYEHRLIDDMVAQMLKSKGGFIIAMKNYDGDVQSDIVAQGFGSLGLMTSILITPDGKTFESEAAHGTVTRHFRKHQRGEETSTNSIASIFAWTRAIIQRGKLDNTDDVIKFGNLLEKATLDTVQVGGKMTKDLALMLGKTNRSSYVTTEEFIDEVAKRLQNMMLSSNEDKKGMCKL

SEQ ID NO: 1715 - protein, 430 aa, Candida tropicalis
  source 1..430: note = Candida tropicalis _Isocitrate dehydrogenase [NADP], mitochondrial; sp|O13285|IDH1_CANTR
MIRASAIQRTAMLLRQLRGFSTSATLADKIKVKNPIVELDGDEMTRIIWQKIKDQLILPYLDVDLKYYDLGIESRDATDDQITIDAANAIKEYGVGVKCATITPDEARVKEFHLKKMWLSPNGTIRNILGGTVFRESIIIPCIPRLIPGWEKPIVIGRHAFGDQYKATDLVINEPGRLELRFTPASGGEAQTQKVYDYTGPGVGLAMYNTDESITGFAHASFKMALAKGLPLYMSTKNTILKKYDGRFKDIFQQIYEQDYAAEFEKQGLWYEHRLIDDMVAQMIKSKGGFVMALKNYDGDVQSDIVAQGFGSLGLMTSALMTPDGKAYEAEAAHGTVTRHYRQHQQGKETSTNSIASIFAWTRGLAQRGKLDETPDVVDFASKLEQATIDTVEVDRIMTKDLALAMGKTDRSAYVTTTEFLDAVADRLKK

SEQ ID NO: 1716 - protein, 498 aa, Aspergillus niger
  source 1..498: note = Aspergillus niger _Isocitrate dehydrogenase [NADP]; sp|P79089|IDHP_ASPNG
MSSVRFSSALARRSFAVASPPLSAPLSSSARRFLSSSSSTISSSSSSVSTRSPRSLTSASSLLSSRTASARWTGLSSLNLTQSRTMATEIPKIKVKNPVVELDGDEMTRIIWQEIREKLILPYLDVDLKYYDLGLEYRDQTDDQVTVEAAEAIKKYGVGVKCATITPDEARVEEFKLKKMWLSPNGTIRNILGGTVFREPIIIPAIPRLVPGWNKPIIIGRHAFGDQYRATDRVIPGPGKLELVYTPVNGEPETVKVYDFQGGGIAQTQYNTDESIRGFAHASFQMALLKGLPLYMSTKNTILKRYDGRFKDIFQEIYESTYQKDFEAKNLWYEHRLIDDMVAQMIKSEGGFVMALKNYDGDVQSDIVAQGFGSLGLMTSTLVTPTGEAFESEAAHGTVTRHYREHQKGRETSTNPIASIFAWTRGLIQRGKLDETPDVVTFAEELERACIEVVNDEGIMTKDLALACGRKEREAWVTTREYMAAVERRLKANLKSRL

SEQ ID NO: 1717 - protein, 427 aa, Saccharomyces cerevisiae; identical to SEQ ID NO: 1112
  source 1..427: note = Saccharomyces cerevisiae _Succinate--CoA ligase [ADP-forming] subunit beta; sp|P53312|SUCB_YEAST

SEQ ID NO: 1718 - protein, 447 aa, Neurospora crassa
  source 1..447: note = Neurospora crassa_Succinate--CoA ligase [ADP-forming] subunit beta,; sp|Q9P567|SUCB_NEUCR
MFKLGRNRALASAFAATSRAPLASRLPSVSQQQRRALSIHEYLSADLLRQYGIGVPKGDVARTGAEAEAIAKQIGGEDMVIKAQVLAGGRGKGTFDNGLKGGVRVIYSPTEAKMFAEQMIGHKLITKQTGAQGRLCSAVYICERKFARREFYLAVLMDRASQGPVIVSSSQGGMDIEGVAKENPEAIHTTYIDINVGVTDEMARDIATKLGFSEQCVEEAKDTIQKLYKIFCEKDATQIEINPLSETSDHKVMAMDAKFGFDDNADFRQPDIFKLRDTTQEDPDEVRAAQAGLNFIKLDGDIGCLVNGAGLAMATMDIIKLNGGQPANFLDVGGGATPAAIREAFELITSDPKVTAIFVNIFGGIVRCDAIAHGLINTVKSLDLKIPIIARLQGTNMEAARQLINDSGMKIFSIDDLQSAAEKSVQLSKVVKMARDIDVGVEFTLGI

SEQ ID NO: 1719 - protein, 333 aa, Neurospora crassa [sequence omitted]

SEQ ID NO: 1720 - protein, 343 aa, Saccharomyces cerevisiae; identical to SEQ ID NO: 1119
  source 1..343: note = Saccharomyces cerevisiae _Malate dehydrogenase, peroxisomal; sp|P32419|MDHP_YEAST

SEQ ID NO: 1721 - protein, 341 aa, Schizosaccharomyces pombe
  source 1..341: note = Schizosaccharomyces pombe_Malate dehydrogenase, mitochondrial; sp|Q9Y7R8|MDHM_SCHPO
MFAKVAFKNFTPLKSIAPRSFSTTSSRAFKVAVLGAGGGIGQPLSMLLKLNDKVSELALFDIRGAPGVAADIGHINTTSNVVGYAPDDKGLEKALNGADVVIIPAGVPRKPGMTRDDLFATNASIVRDLAFAAGETCPEAKYLVVTNPVNSTVPIFKKALERVGVHQPKHLFGVTTLDSVRASRFTSQVTNGKAELLHIPVVGGHSGATIVPLLSQGGVELTGEKRDALIHRIQFGGDEVVKAKAGAGSATLSMAYAGARMASSVLRALAGESGVEECTFVESPLYKDQGIDFFASRVTLGKDGVDTIHPVGKINDYEESLLKVALGELKKSITKGEQFVA

SEQ ID NO: 1722 - protein, 554 aa, Saccharomyces cerevisiae
  source 1..554: note = Saccharomyces cerevisiae_Malate synthase 1 ; sp|P30952|MLS1_YEAST
MVKVSLDNVKLLVDVDKEPFFKPSSTTVGDILTKDALEFIVLLHRTFNNKRKQLLENRQVVQKKLDSGSYHLDFLPETANIRNDPTWQGPILAPGLINRSTEITGPPLRNMLINALNAPVNTYMTDFEDSASPTWNNMVYGQVNLYDAIRNQIDFDTPRKSYKLNGNVANLPTIIVRPRGWHMVEKHLYVDDEPISASIFDFGLYFYHNAKELIKLGKGPYFYLPKMEHHLEAKLWNDVFCVAQDYIGIPRGTIRATVLIETLPAAFQMEEIIYQLRQHSSGLNCGRWDYIFSTIKRLRNDPNHILPNRNQVTMTSPFMDAYVKRLINTCHRRGVHAMGGMAAQIPIKDDPAANEKAMTKVRNDKIRELTNGHDGSWVAHPALAPICNEVFINMGTPNQIYFIPENVVTAANLLETKIPNGEITTEGIVQNLDIGLQYMEAWLRGSGCVPINNLMEDAATAEVSRCQLYQWVKHGVTLKDTGEKVTPELTEKILKEQVERLSKASPLGDKNKFALAAKYFLPEIRGEKFSEFLTTLLYDEIVSTKATPTDLSKL

SEQ ID NO: 1723 - protein, 539 aa, Emericella nidulans
  source 1..539: note = Emericella nidulans _Malate synthase, glyoxysomal; sp|P28344|MASY_EMENI
MSQVDAQLKDVAILGSVSNEARKILTKEACAFLAILHRTFNPTRKALLQRRVDRQAEIDKGHLPDFLPETKHIRDDPSWKGAPPAPGLVDRRVEITGPTDRKMVVNALNSDVWTYMADFEDSSAPTWDNMINGQINLYDAIRRQVDFKQGQKEYKLRTDRTLPTLIARARGWHLDEKHFTVDGEPISGSLFDFGLYFFHNAKELVARGFGPYFYLPKMESHLEARLWNDVFNLAQDYIGMPRGTIRGTVLIETITAAFEMEEIIYELRDHSSGLNCGRWDYIFSFIKKFRQHPNFVLPDRSDVTMTVPFMDAYVKLLIKTCHKRGVHAMGGMAAQIPIKDNAEANDKAMEGVRADKLREVRAGHDGTWVAHPALASIASEVFNKYMPTPNQMHVRREDVNITANDLLNTNVPGKITEDGIRKNLNIGLSYMEGWLRGVGCIPINYLMEDAATAEVSRSQLWQWARHGVTTSEGKKVDKAYALRLLKEQADALAAKGPKGNKFQLAGRYFAGQVTGEDYADFLTSLLYNEISSPGTASKL

SEQ ID NO: 1724 - protein, 542 aa, Neurospora crassa
  source 1..542: note = Neurospora crassa_Malate synthase, glyoxysomal; sp|P28345|MASY_NEUCR
MASVETLLQGVTISGPIEEHQRKILTPQALSFVALLHRSFNQTRKNLLERRQLRQAEIDRGVLPDFLPETKHIRENPTWKGAPPAPGLVDRRVEITGPTDRKMVVNALNSDVYTYMADFEDSSAPTWANMVNGQVNLYDAIRRQIDFKQGPKEYKLRTDRTLPTLIVRPRGWHLEEKHVTIDGEPVSGSLFDFGLYFFHNAKELVQRGFGPYFYLPKMESHLEARLWNDAFNLAQDYVGIPRGTIRGTVLIETILAAFEMDEIIYELREHSSGLNCGRWDYIFSTIKKFRNHSSFVLPDRSCVTMTVPFMDAYVKLLIQTCHKRGVHAMGGMAAQIPIKDDKAANDKAMEGVRADKLREARAGHDGTWVAHPALASIALEVFNKHMPTPNQLFNRREDVKIGQQDLLNMNVPGSITEEGIRKNLNIGLGYMEAWIRGVGCVPINYLMEDAATAEVSRSQLWQWVKHGVTTAEGKRVDKSYALKLLKEQTDELASKAPQGNKFNLAAQYFATQVTGEDYADFLTSLLYNEITSAGNSLPASKL

SEQ ID NO: 1725 - protein, 555 aa, Pichia angusta
  source 1..555: note = Pichia angusta_Malate synthase, glyoxysomal; sp|P21360|MASY_PICAN
MAQINPTTLDNVKILGEVSDKPLLSKATPRDILTKDALKFIVLLHRSFNETRKQLLENRQKVQERLDAGESLHFLEETKYIREDPNWKCLPTHPKLQCRKIEITGPPDAKMIVNAFNTDVFTYMTDFEDSCSPTWNNMIYGQVNLYDAIRDRIDFTNEATGKRYKINREGRRVPVMIVRPRGWHMVDKHILVDGEPISASIMDFGLFFFHNAKFLLSQGLAPFFYLPKMEHYKEAQLWNDIFCVAQDCLEIPRGTIKATVLIETLPISYQLDEVLYALRDHSAGLNCGRWDYMFSTIKRLRNQKQHILPDRHQVTMTVPFMTNYVKQLIKICHKRGVHAMGGMAATIPIKDDPEKNAAAMEAVRQDKLREVLAGHDGTWIAHPGLLPTALSVFQEHMPTPNQIHVQKNVEITEADLVDTNIPDGKITMKGVSANIYIGLNYMESWLRGLGCVPINNLMEDAATAEVSRLQLYSWCKHAVKMDDTGKTITPEFISKLIDEEAERCAANKPNNKFKIAADCLKKEINGHTEVAEFLTTLLYDDIVTIGPEVDISSLK

SEQ ID NO: 1726 - protein, 565 aa, Schizosaccharomyces pombe
  source 1..565: note = Schizosaccharomyces pombe_NAD-dependent malic enzyme; sp|P40375|MAOX_SCHPO NAD-dependent malic enzyme; OS = Schizosaccharomyces pombe (strain 972 / ATCC 24843); OX = 284812 GN=mae2 PE=1 SV=1
MPAGTKEQIECPLKGVTLLNSPRYNKDTAFTPEERQKFEISSRLPPIVETLQQQVDRCYDQYKAIGDEPLQKNLYLSQLSVTNQTLFYALISQHLIEMIPIIYTPTEGDAIKQFSDIYRYPEGCYLDIDHNDLSYIKQQLSEFGKSDSVEYIIITDSEGILGIGDQGVGGVLISVAKGHLMTLCAGLDPNRFLPIVLDVGTNNETHRKNHQYMGLRKDRVRGEQYDSFLDNVIKAIREVFPEAFIHFEDFGLANAKRILDHYRPDIACFNDDIQGTGAVALAAIIGALHVTKSPLTEQRIMIFGAGTAGVGIANQIVAGMVTDGLSLDKARGNLFMIDRCGLLLERHAKIATDGQKPFLKKDSDFKEVPSGDINLESAIALVKPTILLGCSGQPGKFTEKAIREMSKHVERPIIFPISNPTTLMEAKPDQIDKWSDGKALIATGSPLPPLNRNGKKYVISQCNNALLYPALGVACVLSRCKLLSDGMLKAASDALATVPRSLFAADEALLPDLNNAREISRHIVFAVLKQAVSEGMSTVDLPKDDAKLKEWIIEREWNPEYKPFV

SEQ ID NO: 1727 - protein, 669 aa, Saccharomyces cerevisiae
  source 1..669: note = Saccharomyces cerevisiae_NAD-dependent malic enzyme; sp|P36013|MAOM_YEAST NAD-dependent malic enzyme, mitochondrial OS=Saccharomyces cerevisiae (strain ATCC 204508 / S288c) OX=559292 GN=MAE1 PE=1 SV=1
MLRTRLSVSVAARSQLTRSLTASRTAPLRRWPIQQSRLYSSNTRSHKATTTRENTFQKPYSDEEVTKTPVGSRARKIFEAPHPHATRLTVEGAIECPLESFQLLNSPLFNKGSAFTQEEREAFNLEALLPPQVNTLDEQLERSYKQLCYLKTPLAKNDFMTSLRVQNKVLYFALIRRHIKELVPIIYTPTEGDAIAAYSHRFRKPEGVFLDITEPDSIECRLATYGGDKDVDYIVVSDSEGILGIGDQGIGGVRIAISKLALMTLCGGIHPGRVLPVCLDVGTNNKKLARDELYMGNKFSRIRGKQYDDFLEKFIKAVKKVYPSAVLHFEDFGVKNARRLLEKYRYELPSFNDDIQGTGAVVMASLIAALKHTNRDLKDTRVLIYGAGSAGLGIADQIVNHMVTHGVDKEEARKKIFLMDRRGLILQSYEANSTPAQHVYAKSDAEWAGINTRSLHDVVENVKPTCLVGCSTQAGAFTQDVVEEMHKHNPRPIIFPLSNPTRLHEAVPADLMKWTNNNALVATGSPFPPVDGYRISENNNCYSFPGIGLGAVLSRATTITDKMISAAVDQLAELSPLREGDSRPGLLPGLDTITNTSARLATAVILQALEEGTARIEQEQVPGGAPGETVKVPRDFDECLQWVKAQMWEPVYRPMIKVQHDPSVHTNQL
